United States Patent Application Publication US 2026/0345699 A1, published November 5, 2026 (application 19/148,591).

The application's sequence listing, which the Patent Office published only in electronic form, follows.

SEQUENCE LISTING (1 sequence)

SEQ ID NO: 1 - DNA, 1992676 bp, Lactobacillus johnsonii
  source 1..1992676: mol_type = genomic DNA
ttgtttgatctagataaattttggcaattttttaatgctgagatgaaaaaaagctacagcacggttgcctataatgcttggtttaaaaatactaaaccaatttcctttaataaaaagacaaaagaaatgataatcgctgttgaatcacccgttgcaaagggatactgggaaaagaacttagcttctcaactcattcaagaagcatatgcttatgccgacatggaaattcaacctaaatttgaagttgcaggtaaagaaggtcctgaacgtttagttacaccacaaccacgaattaaaactaatcaagaaatattagaaaatcgtagagatgaatttgctcaagaccttcaactaaatagtaagtatactttcgatacttttgttcaaggtgagggaaacaagctggcagcgggtgcagccttagcagtcgctgataatccgggaagtttttacaatcctttgtttatttttggtggagttggtttaggtaaaacccacttaatgcaagccattggacaccaaatgttggctgaaaaaccacatgcaaaagtggtttatattcagagtgaaactttcgtaaatgattttattaactcaataaaaaacaaaactcaggctgaatttcgtaataagtatcggaactgtgatctcctattagtagacgatattcaattcttttctaaaaaagagggaatccaggaggaattcttccatacttttgaaaccctttataatgatcaaaaacagattgttatgactagtgatcgtctaccaaccgaaattcctgaattatcagaacgtttagtttcacgctttgcttggggactacaagttgaaattacgcctccagatttagagactagaattgcgattttgcgaaaaaaggctgaaaccgatggcctagcaattgacgacagtacccttgactatattgcttcccaagttgataccaatattcgtgaactcgaaggagctttagttaaagttcaagcccatgcaacaattgagcgcgaagatattaatgttgacttagccaaagaggctctagctgacttaaagttggtacaaaaaaatagggggcttcaaatttctaagattcaagaagttgtggccaactatttccaaacctcaactactgaactaaagggtaagaagcgtgtaaaacaaattgttgttcctcgacaaattgcaatgtatttgtctcgtgagttaacagattctagtttgcctaaaattggacaggaatttggcggtaaggatcacacaactgtaatgcatgcttgcgataaaatttcgcgtgccttaaaaactgatgctgaaattaaagcagctgtgtatgatttaaaggctatgcttgaacactaaaagttaataacatgtggataacttttaactttgtccacatttattaaacatgcaaaagtgtgttttattcaggtgtttggctactttcccacagattccactggccctactactacttctaagtatttaaatatataattaaataaaacaacgtacatataatttcacaggaggtaaacgatgcagtttacaattaatcgtaatttattcctcgaaaacctaaataatgctatgcgtgcaatttcttcacgtgctactattccaatattaagtggtataaaacttacccttacagatgaaatgcttactttaaccggtagtgatactgacatttctattgaaattcaaatcccagtaaacgatgatttaattgttcaatctacgggatcgatcgttttaccagcacgatttttcagtgaaattgtaaaaaaattaccaggtaaagatttttcatttgaagtaaaagaaagttttcaaacgaaaattgtttctgaaaataccgaattcatgattaacggtttagatgcaaacaattatccacacttaccagaaatttctactgatgcatcattcaaaatttctggtaaaacatttagagaaattattaacgaaactgtttttgcagtcgctactcaagaaagtcgtccaactttaactggtgttaactttatcttcaacaattcatcaattaaagcagttgctaccgacagtcaccgactatctcaacgtcaaatttctctagaaaatggtcctcaaacaagtactgacttaattattcctggaaagagcttagtagaattatcccgaattatcggagaaagtgatcctgaaatcacagtaaatcctggtgaaaaccaagttttatttgaagttggaaacattgcattctattcacgtttacttgatggacaatatccagacactgatcgtttaattccaactgaatctacaacatcagttgaatttgaattaccagttttagctcgttctctcgaacgtgccagtcttcttactcacgaaagccgtaataatgtggttaagatgactcttgatgttcaaaatcaattagttaaactccaaggtgattcaccggaaataggaaatgtggaagaagaaattggctttaagaatcttgaaggagatggcttaactatttccttcaatcctgattatctaagagaagctttacgtgcctctattactgattccattattatgaactttacccagccgctaagaccatttacagtgataccggcaaaacaagatgttaatttcactcaattaatcacgccagttagaacattttaatttataaaaagagctacaaaagtagctctttttttcttgcattgtatttaaaagctaaatttaggctgattaagcgaattttcatccagttaagagtcatattaaattggaataaagcggcttaaaaaaggctacaatacgtcataaaattgaatttcacataaaaaaacggtataatgactaggtatgacaaggtaaatggggtgatattatcaaaaaattcacaattaagggagaatatattacgctggctcagtttttaaaagaagagagtgtgatatcttctggtggtcaagctaaatggtatctaaaagaaaatcctgttaagttgaacggtgaagtagaagatcgccgtggaaagaaaatacatcctggagatgtactgaacttggctggagaagagtatgaatttatttcagagtagccgatgtatcttgcaaactttgaattgaaagattttagaaattttgaagaactaaagataaattttgaccctcatgtaaatatttttattggtccaaacgcccaaggaaaaactaatttacttgaggcgatttattttttggccctaactcgatctcatcgaacaaatagcgataaagaattaattcgttttggaagtaaatttgcgggcttacaaggaaaagttcataaaagtcaattagaagtagagttaaaattacgtttaacaccaaacggaaaaaaagcttgggtaaatagactcgagcaaaagaagctttccgcttatgtaggacaaatgaatgcaattttgttttctcccgaagacctagccctggttaaaggagctccatcaattagaagacgttttatggatttagagtttgggcaaattaattcagaatatctatattttttaagtcagtatcgtcaggtactgcaacaaagaaacaattacttaaagcaattgagcataaaaaaggcaaatgatttagtttttttagatgtcttgtcagatcagcttgcaggaattgcagcggagataatttctagaagaatcaaatatattaaaaaacttaattcatatgctcaaagtgctcatagtgagattagtggtcaagctgaaaaattacagattttttatcgtccatcagttaaggaaattaccccagatgatgatgtagagaccatttatcaaaaagttattactagttataaaaaaaatcgtcctaatgaaattcgaaaggggactactttgagtggacctcatcgagatgacttggattttttgattaacgataaaaatgcccatgattttgcatctcagggacagcaacggacgatttctttaagtgtaaagttggctgaaattcaattagtacatgaactgacacaagagtatccaattttacttttagatgatgtaatgagcgaattagatcatcgaagacaaagtagtttactaaattatattcatggaaaaacgcaaacttttatcacaacaacagatttagaaggtatttcttgggaaatcgtgaaagaacctaaggtctatcacatttctgctggaacgatcagtacaaaggagagttaaatggcagaagataagagcaaggcagcattaaataaagctaaagattttgaaaagcgtgctgatacttataacgcaagtcaaattcaagttctaggcggacttgaagcagttagaaagcgcccaggtatgtacattggctcaactagtagccaaggcttacaccaccttgtttgggaaattattgataatagtattgacgaacgattagcaggatttgcgaccaagattgaaattactgttaatgaagatggcagtgttacagtccaagatgatggacgtggtattccggttgatattcaagctaaaacaggtcgtccagccctagaaactgtatttactgttttgcatgctggtggtaaattcggcggtggcggatataaagtatctggtggtcttcacggtgttggtgcttctgtagtaaacgccctctcaactaaacttgaggttactgttatgagggatggaaagaaatatgcaatttcttttgatcatggccgtgtagtaggagaaatgaagcaagtgggaactgtacctcttgaagaacatggaacaatcgttcgtttctatcctgatccagatatttttacagaaactacaactttcgacgataaaattttaaagaaccgaattcgtgaacttgctttcttaaacaagggcttaaaattaacctttaccgataagcgtaaagaaagtgctgaaactgatgtttaccactttgaaggtggaatcaaagaatacgttgcctttttaaacaaaggtcaagaagtgttatttgatgaaccaatctatgttgaaggtaattatgaaggtattgatgttgaagttgcattgcaatacaccaatggctataaaaccactttaatgacctttgcaaacaatattcacacctatgaaggtgggatgcacgaagctggttttaagactgctctaactcgtgtagttaacgattatgctcataaggctaaaatcttaaaagataaagatgacaacttatctggtgaggatattcgtgaaggaattacggcaattgtatcggttaagcaccctaatcctcagtttgaaggtcagactaagactaagcttggaaactcagatgctagaactgcagtggaccgagcattttcagaaacgtttagtcgtttcttaatggaaaatccttctgttggtcgtaagattgttgaaaaaggacaacttgctgaaagagctagaactgctgctaagcgtgcacgtgaagttacccgtaagaaatcaggacttgaaattgctaacttgccagggaaattagctgacaataccagtaatgacccaagtatttcagagttatttatcgttgagggtaactctgccggtggatctgcaaagcaaggacgttctcgtttaacccaggcaattttgccaattagaggtaagatcttgaacgttgaaaaggcatcaatggatagaattcttgctaaccaagaaattagatccctctttaccgctttaggtacaggatttggtgctgattttgacgtttcaaaggcaagataccataaattgatcatcatgacagatgccgatgtcgatggtgctcacattagaactctgcttttgactctcttttacaactacatgcgtccaatgatcgaaaaagggtatgtttatatcgctcgtccacctctatatcaagttcgccaaggtaaggtagagaaatatctcgataccgacgaagaattgcatgattacttaggtaccttgcaaccaagtcctaaaccaattgttcaacgttataagggactaggagaaatggatccagaacaactatgggaaactacaatgaatccagaaaatcgtcggttagatcgagtaagtcctgaatatgcggaagatgctgacaagatatttgacctcttgatgggtaatgaagtaggtccaagacgagaatttattgaaaagaacgctaaatacgttgagaatttagatgcttaggaggctttagatggctaacgaaaatcaacctcaagatcacagaatacgtaatgttgatttaacccataccatgcgtacatccttcttagactacgctatgtcagttattgtggctcgtgccttaccagatgttcgagatggtttaaagcctgtacaacgtcgtattctttacggaatgcatgaattaggagttacaccagataagcaatataagaagagtgccagaattgttggggaagttatgggtaagtttcacccgcatggtgactcttcaatctatctagctatggcccacatggctcaagacttttcatatcgttacatgctagttgatggacacggaaattttggttctgtcgatggggatgaaccagccgcaatgcgttatactgaggcaaaaatgagcaagattgcggttgaaatgcttcgtgatatcaataaagaaactattgattggcaacgtaactacgatgatacagaaaatgaaccagtagtattaccagcaagaattcctaacttacttgtcaatggtgccagtggtattgcagttggtatgacaacaaatattccaccacataatttggcagaggtaattcgcggcattcacatgttgatggataaccccgatgttactaccaaggatttaatgaaagttattcctggtccagattttccaactggtggaattgtgatgggacgcggaggtatttaccgtgcctatgaaaccggaaaaggaaatatcgttgttcgggcaaagaccgagattgaaactgaaaaaaatggtcgcgagcgaattgtagttacggaacttccttacttagtaaataaggctgaattagttaaaaagatagctgatttagcccgtgaaaagacaattgatggtattactggtgtacgggatgaatcagaccagactggtatgagaattaccattgatattcgccgtgatgcaagtgctagtgtggttttgaataatttatttaaagaaacccaaatgcaagcaaacttcggaatgaatatggtggccattgttaatggtgcaccgcatttcctaactttgaagcaaatgcttgagtactaccttcaccaccaagaagatgttattactcgtagaactaagtttgagttaaagaaggctgaagctagagcacatattttagctggattaagaattgcccttgatcatatcgatgagatcattaagattattcgcggttcacaaaatagcgatattgctaaggcacaattaattcaaaactttggcttagacgatcgtcaatctcaagctattttagatatgagattggttcgtttaacaggcttagagcgcgataaaattgaagctgaatatcaagatttgcaagcaaaaatagcagattacaaagatatcttagctaaaccagaacgaattgatgagattatttacaacgagttacttgatattcaaaagcgttttggtgatgatcgtcgtactaagattgccgaaggtgaagcagtttcaattgaagatgaagatttaattgaacaaaaagatgttcttttaactctaactcataatggctacattaagcgtatgccagcggatgaattcaaggttcaaaaccgcggtggacgtggaataaagggaatgggagtgcaagatgatgatttcattaaccatttaatcttctcaagtacccatgactttttactattcttcaccaacttaggtaaggtttactcaaagaaagcctatgaaattccagaatttggaagaaatgctaaaggcttgccaatagttaacctcttggaacttgataaaggtgaaaaaattcaagctgtaattaatgtacccgaaggagcggacgataattatctcttctttgttactaagatgggaacagttaaaagaacaaaagtcagcgaattccagaatattcgtcgaagtgggttaattgccttaactttacgagatggggatgaactgaataatgttttaactaccgatggaaaacaaaatattcttatcggtacccatttaggttatgcagttacctttaatgaaaaagatgttcgttcgatgggaagaacagcagctggtgtccgcggaatcaatttaagagataacgattatgtcgttggatctgatattctagaacctgattcagaagtattagtaatttctgaaaaaggatatggaaaacgtactgcagcttctgaatacccagttaagggacgcggcggtaaaggaattaagactgcaaacattactgaaaagaacggtcctttagccggtgtaacagtagttaatggcgatgaagatattatgctaattaccagtgcgggagtcatgattcgatttgatgtggacgatgtttctcaaactggaagagctacattgggtgtacgtttaatcaaggttgacgatggtgcacaagtagcaagtattactgccgttcctaaagctagtgatgaagacgaagaaagcactgctgaagaagaaccagtaaaagaaaattaataaataaaaaattaccaaattttttgcgtaataataattgagtaatgaaactcaggatcacgtgaaaaaatatttggtaattttttgtttatgtgataaaatcaagcattgtgagtaatattattcattactccttgttcttgattttaacaagaaccatttagtccaagaggaggtgcaattattatggcaaaaactaagtacgaagttacttacatcatcaagcctgatattgacgaagattcaaagaaagcattgatcgatcgtttcgataaagttgttactgacaacggtgctgaagaacttgaatctaaagattggggtaagagacgtttcgcatacgaaattgaaaaataccgtgaaggtacttatcacattatgactttcgttgcagaaaactctgaaccagttgatgaatttggtcgtctttctcgtattgataaccaaattttacgttcaatgactgtaaaattagacaagtaatttgttttcgtgaattaggaaggggacaaaagtatgattaataatgttgtacttgttggccgtttaacacgtgatcctgatttacgtacaaccgggagcggaatctcagttgctacgtttactctagctgttgaccgtcaatataccaatagtcaaggtgagcgtggtgctgatttcatcagctgtgtaatttggcgtaaagcagcagaaaattttgctaactttacttcaaagggttcattagttggtattcaaggtcggattcaaactagaacgtacgatgataaagatggtaagagagtatacgtgactgaagtcattgttgataatttctctttactagaatcacgtcgtgatcgtgaaaatcgtcagactaatggtggtaattttgctccgcaaggaggaaatgctccaagtaccaataattttggtggatcaagtgcaccaagcatgaataatgctcctgctagtggagaaagcaataaaccgcaagatccatttgcagattcaggtagcacaattgacatctcagatgatgatctcccattttaattttaattagaaaggatctttgatatggctcaacaaagaagaggtggccgtcgtcgtcgcaaggttgactttattgcagctaaccacattgactacatcgactacaaagatgttgatttgttgaaacgttttatctctgaaagaggtaagatcttaccacgtcgtgtcactggcactagcgcaaagaatcaacgtaagttgactgttgctattaagagagctcgtgttatgggcttattgccattcgtcgcagaagactaataacagatcacaattaataaaaagagtagcttatgctactctttttattttgttttttgcggtattataaaagaagtaaatggagggattgtcatgattattaagcaaaaactagccggaaacattgattttgactacaaatggtacgatatttataactgtgacgatcatgatattagattattaaaagatgattttgatttgacatccgaaattatctcttatattaccgaccttcacgaacgtccccactttgatcatgattatattactaacagtgatttgttggtttacgatgttccagtctggccaacagctgatgcagatcattttacaactttaccaattaagtttttaatggtcgatcatacgctttttactgttcattctcctgatacaacttatatgattgaagaatttaggcaacgaccagatgagcatattcatagtgaaaaggaattgatttttgctattctttttgctgttacaaaatactttcaaagggcacttagtcaactaaacagtcaacgactagttttagataataacttaagtgagcgaattcataataaagacttacaagaattatcacaagttgaaaaaagtttggtttacttatctagctcaattagaactaatctaatgatgcttgaaagtctaaaaaataaaaaatcaggacttcatatgaatgcttctgaagaggaaatgtgtgacgatattatcatcgaagttcagcaatcttcacaaatgatcaaaatttatagtgaagtgactgaagaaatttctaagacatctaataacattctgaataataacttgaacaataccatgcagtttttgactgtgtggtcactgttattaacaattccaacaattgtaacagggttctttgggatgaatgttgatttgcctatttttcataatccatttgattgggtaataattactgttggctcaattattgtaatggcaattttgctttggtatttacgtcgacataatatgctataatgcttgcttagcttagatgataagcaagcattttttgatgtataatataaagcgatgcagtatatatttttgatgatattaatgctataaacaggaaggaatttcaatgaaaggctttttacgcaaattagaattgcctgaatttgttaaagatacacgtttaacagcatcgttgattattgtccttgttttatccttattaggagcaattattgggacattaattagtccactttttggacttgctatggtgctgctgttcatcttaacaattatttttgtaatatatggaatttatgttctagctgggaatactaataattatgctgctaatctttcataccgcataaagcgtggggaacaagaggctatgattaaaatgcctctcggaattatgctttatgataaagatcgacaaattcaatggattaatccttatctgcaaatgtatttgcatggtaaagatattattggctcttctatctcgtcagtagataaggagttagctaaatatgttgatgatgctattaagtcaaatagcaatcaaaataaaattattaaatggggcgaccgcaagtttgaaatggttgtccaagatgacttgggtgtcgtttatttacttgatattacgcgctatgccaatattgaggagaagtataagcaagagagattagcaattggcttaatatttattgataattatgatgaattaagccaatctatgagtgatcagaacttaacaaatatgagctcatatgtccaaaatgcccttagcaattacgctggacaatttaattcatatcttaaacgcattgatgaagatcactttattttattgacgcatatgcatgatttagccaagatggaagaagataaattctctattttggataaagttagaactgaatcaagtcgaaagaatatgccattgaccttgtctattgggattgcgtttggctcagaaagcttaaatgaaattgctgatcaagctcaatccaacttagatttagctttaggacgtggtggagaccaagttgttgtaaagcaatcgggtcacgaagcacatttttatggtggaaaatctaatccaatggagaaacgaactagggtaagagctcggatggtttctcaggccttggtagaattatttaagggcgttgaccatatttttgttcaaggacatcgaaatcctgacttagatgcgattggctctgcaattggaattgtaaaaattgctcgaattcatggtgtaaaagctagtgttgttttagatgttgatcacgttaattatgacgtgggacgtttgattgctaaaatgcaagctgccggtatcgataaagatgtatttatttcgcctaaagatgctttagaagaagcaaccgatgagtccttactagttttaacagatcactctaagtacagtattacttatgatccagaactttacgaccggttgaagaatcgattaattattattgatcaccaccgccgcggtgaagaattccctgaaaatccaatgctggtatacattgagccttatgcatcttcgacttgtgagcttgtaactgagatgattgagtaccaacctcaagggggagaaggtgtcttgactgatttagaagcatcagctatgctagctggtattacggtcgactcaaaggaattctccttgagaactggaactagaacttttgatgcagcaagttatttacgatcaattggagcagatacgcaagttgtatctgaacttttgaaagaaaatatcgataattacttgcaaagaagtcacttagtttctacgattgacatgatcgaaccagatatggctctcttagtgggtgaagaaaataagatttatgatcccattattactgctcaagcagctgacacagccttgtctcttgaacacgtagatgctagttttgcattgactagacgaagtaaagatgcagttggtatctcagctcgttcaatgggtaatgttaacgttcaagtaattatggaaaaactaggcggaggcggtcacttatctaatgccgcaactcagctcaaggggataacaatcgaagaagctaaagttaagctcttgggagcaattaatgactatcttaaagaaaatgaataggagtgaaacttatgaaagttatttttattaaagacatgaagggtaaaggtaaacgtggagaagttaagaacgtacctgatggctatgctcaaaatttcttgattaaaaatggatatgctaaagaagctactagttctaacttaaataccttgaaacgtgttcaaaaagctgaaaaagatgcttatgaagcagaaaaggctgctgctgaagatattaagaaaaaacttgaagacgacaaaactattgttaactttaagtctaaggctggtactgattctcgcttatttggttctatttcaagtaagaagattgttgaaggacttgaaaagcaatacggaatcaaggttgataagcgtaaattagagcttccagaaccaattaaatcattagggtatacaaatgtacctgttaaattatttaaaggcgtagaagcagtaattcgcgttcacattacggagcaagactaataatggataatgttgtttctcaacaaattccccatgatagtgaagcagaaaaggcggtcctaggggccgtctttttagatcccgaagcaattattgatgcttcagatgtattacagcctgatgatttttatgaacatgcaaatagaattgtttttcaggcaatgcttaatatctcagatcgtgaggaagtaattgacccagttactttacaagatgagttaaagaaaaataatcaagtagatgatattggaggtattgcctatgttacagaactatcaatggcaactccaacagcagcccatgttacttactacgcaaaaattgtaaagcgaaaagctattcttagaaatctaatttctactagtcaaaggattattcaaaatgcaattgaaggttctgatgatgtaactgatatcttagatgatgcagaaagccaaataatgggggtctcccaggataatgcaagtggtgggttcaaatctattcatgatgtattaaacacggctatggaagaaattaactcgattcctgatgatggaaatatggtaacgggtctaccatctggattttctgaattagataagatgacaactggttttcacgatgatgaattaattatcttggctgctcgtcctggtgttggtaaaactgcctttgctcttaatgtggcacaatttgttggactaaaaactgataaaactgttgctatgttctcacttgaaatgggagctgagcaattagttcaaagaatgctagcttctgagggactaattgattcacagcatcttagaaccggtcagctgactgatgaagagtggcgtaagctagttgtagcagctggttcactagataataccagtatctacattgatgatacaccaggaattaaaatgagtgagattcgagctaaagcccgtagattagctaaagaaaaaggaaatttaggcttaattgtaattgactacttgcagctaattgaaggaccacgaagtgaatctcgtcaacaagaagtttctgcaatttcacgacaattaaagaaattagcaaaagaattgcatattcctgttattgctctatcacaactttcgcgttcggttgaacaacgtcaagataagcgcccagtattatctgatattcgtgaatctggatctattgaacaggacgccgatattgttgccttcctttatcgtgatgattattatcgtgaggagcgcgataaagatgatgaaggcgaagtagaagcagaagaagataacggcgaagtagaagtaattattgagaaaaaccgttctggtacacgtggaacagtaaaattaatgttttctaaaccatataaccgtttttcaaatcttgactatactcatagcgaggcttaaaaaaaagatttgtaagcgtttcattaattagctatactataatagttaaaagtatatctttttagtaaagttaagtgaatgagaaggtgtaagttgaatggtagaaaataaatatgtcggcagtattgaagctggtggaactaaattcatcttggcagttcaagatacagaaagtggcaaaattgtagctaagaagagaattccaacaacagatgcaaaagaaactttagcaaaaagtattgaattctttaaagagcacccagtagctgctttgggaattggtacttttggtccaattgacatcaatccaaattctagaacatttggttatatcttagatacacctaagcgtggttggtcaggaaccaatgttaaaggcacttttgaaaaagaactaggtattccagtggtaatgactacagacgtgaatgcttcatgttatggtgagtatattgcacgtggaaaagatgattctaagacttatttctatgtaacaattggaacagggattggtgccggcgcggtacaagcaggtaaatttattggtttaaataatcacccagaaatgggccacatgctagtcactccttaccctggcgacaactatactgggaaatgtccatttcatggaaataaatgtgttgaaggaatggcagctggaccttctctagaaggaagaactggtattccaggtgaaaaattacctagagaccacaaggtatttacttatgtttcatactatgtagctcaattattatttaatgcttacatgacaatgcgtccggatgtaatggttgttggtggatcagtactcaatgatcaagacttggtccaagttcgtggattctttagagaatttaataataattatgtcgcaacgccagacgtcgacgaattaattgtacgtccagcagttgaagacaatggttctgcaactttaggtgactttgaactagctaaggaagctttgaaaaatcaataaaaatatatagtaaaaaggcaacttcatttgaagttgcctttttgtgtttcacatgaaacaaatttaacttccatcatatgaatcatcaacaattggtcctttacttgaatcgttgccaaggggcgctagatgttcagtatggttaagaaatggaagattaatgtattgacgtgctgtcgtggtaatatcagatactatttcattagcaattaagcgagttttgggatctaatgaaagataagcatgactgaattggattgcgccacgaattttattagttgttagttgactagcatcggtaattttttgagattctagagcagtaaagaaagcaagccagagctcttcacgtttttcacgtggaatttttgtattccaggaaataaatgtacttctaataattctgctagcattgctgagacaaggagccataacgaagctatttcgagcaacttcccaatgaaggggattatgctgctgcattaaatgtttcatcttgcttttaactacgatgacacgttcgggatgatcaagcatcatcccaaaaattgatccttcgggaacataggtaatcatcttgggaatagctctttgaaattctagttgatcataagtttctttcataaacccaggaccatcaaaactatatgcttttattatttgatcttgaattttaggtgaaacagcagagatagcataagcagcaaaatttccaccttttgaatgaccagtagtataaatttgcttatcaggataagtctgggcaattttatctaaatagtctgctgctacactttgtccaaaaatttctggctgataactcatatctacatcttcattcagtccgaccatggatccatcagttcctcgataggctactagaatagtctgaggatctaattcaattgtcatggctgtgaactgtactggtggctttttctgggaaagatgagaccagtctaaaaagcgcatatttttatatcgatcactaaggttgattaattgagcttctactttatctgaatgaattaatgtctttttttgtattaaacgttttgtagctgcttcgagagtatgccctttaacactagaatcaaaaggaagataagcaaatgcggcaaaaagtccagcatctaaactattaaatggttctcgatcaagtgttaggtcccctcgccagcgaacataatcaagtattttacccaagataaaagtcctctcattaagggttgtattatttttattttaatgctttttggcttaaagataaaagcagaacacatttatctataaaaaaagaagagctaatgctcttcttgattactaaaatatcagttgaatagtttcaagaggtgaaagggaagacttaattgtagcaagattatctcttacatcaattttaactacttccttttcaatgctactaccatactttctaattaaggtagccgtagtagatggtaaaggctcactgatgtgccatttaatctctgtataactatctaagttgaaattagctagccagactactttgccattttcttgaatatttaatttaacgtgaggcatattgattaagtagtcagtaggttcaacgctagccataatttgttgcatcaacccttgtttatatgaagaaaattgtgattcccaaccgtgttttggatcttgatccatgggaaggacaattatatggtcatcaataactgccatgaaatttccaagtttttgatcgatagaattataagccgaactccaaattttgacattgctatttggctgataatcaagctgtaaataattaccagtgtgttgaagcatggtaatacgtggatttttaacgccttgaacagtaacaccatctgcttgttcaaatgattgatatccacttttagctgcatgccatttagccgattgaatatggagtaagttacctaaatctcgatcaagcaaaacttgaatactttcaccatcaagtagaactgtattttgtgtgattagtttagtgatttgactatctgtaagattgcgcagcagttgaccagcgattgcaattgtttgatcttcgatttcaaaattatcttgaataggcaaaatagttgttgcaaagctaaaactggctaaaagactagcccagtttttttcatggggaagcaattcttctggctctttgccccaagtagtatgagcagtataagcagaatcctgatctactagaactttaatacctcttaattctttcatattgagacggtggttagataaggcagaagcaaatggtttaatatctgcaagcattttgccatagccccaatcttcattaattccgttgcccatcatatcaaagatattaagcataatgccctttgcaccaagaagggcagtcgtaataatttgaaaagcaataaaggtattagattttacttgcggagtccacattgaattttctagttctggatataattcagcatgtgggcctaaaaacgcagcagtattacggctatattcttcgaatttgcgtccataaatcaaaggagctacttcgttataagctggtaggtgaggccgggctacacgtgggtgtccaggaccagcttgagcatcaaatagcttagcccagtctctgccttcaatagcgtgccagtccggaaatgaagtcatttgtcccatatcagtatctggacttaccttatggactgcttgttcaatcaaatgctcgttttcaatcatctctttgcgagcttgatcaagataaatctttcgttcaatagtaggctctccaggctttaacatgtttttgacaaattcttctcgactttcagccctacctagtttttcttggtatagcttcatatgatagtcgcagaagcacatcaattttagaggagtatggttatagtgtctaaagtcatcctccatccataaacgacgaggatgaattgaggcatattgtgcatattgctgagctaaatatttacgccaagtaggatctgcaggacaagccatatctttagccttgttaccattaatatctacaaaagtattaaagccaatcttaggattaacactaaatccacggtctgagtgcataatagttgtccatggatttaaactagtcgtaacaccaagtttagctagttgcttttgtagggggataatggcatccaaccaaacttgagtctcttcttttgttaagtggctatggtttaattcttcaccgttaataatgaaagctacgtcatcaatttttgctttttgtacaaaatttaaaagtttttcatctttttcaggtgtgttggtacgtggatcaaaaacgtaacgtaatgtataagtgtagctcatgttatatcctcaatattcatactcaattaatattagtaatgtttgtcaatgtaacttattatattaagctacattgacatagtaacattatttgaaagcgttttccagaataacaaaataaaatattactaacttaactaaaaaatcaaaaaaactcttgtgtattaataaaatatatgattaaatacataattgtcatctaaataagctgacttagctcagttggcagagcacgtcactagtaatgatgaggtcgaaggttcgaatcctttagtcagcactataagaacaaaaaagcgctagtttatctagcgtctttttttatttttatgctaatcatgattttcatttatttctatcgccttatttctacttgttttttccttacgcttaagatagtaaaaaataggtaggccaacagctactattcctaaaaatagaactacaccagcaggatcattaaatagttcactgacaatgataaataatccacctaaaattgcaacgattggtactaaaggatagagcggagtactaaaaggacgattagaattttctcgtcttaatttaaaaatgccgaaaaaggccaaaatataaaagcaatatatcgtaaagacacataagtctgataagcgatcaggatcgaacaatactagcattaaagttgctaatacggtgataaaaatagtagcaacgataggagattttccttttggagttaaataggttaaataagatgaaaatggcaaatcatttcttttagccatagcataaacaattcttggaaaagtaataattttaccattgagagtaccaagcatcgaaataattattcctaatgttaatagctttccaccaatattgccaaaagcttttgtagctaaatacgtagttgtatcctctcctaggcgctcaataaggtcggctggaataaagcgtaagataccgactgtaattagagtgtagatcgttaaaacaatcgtaattcctaagataatcgcttgcggaaggactttttgaggatttttcatttcaccacctaagttcgcaattaaaatccagccgtcgtaagcaaacaaggtagctaacacagcaactccaaatccgccactactttgtttaacgtcagaaatagtctgacctaaggcattattttgaccccaaaagataccaaaaataataattgcagcaatcggaatcatttttccaattgtagtaataactgaaaatgctgcacctaccttattatctaaaaaattaataatagtgataaaaagcatacacccaattgatagaggaatgcgccaggaatcatttagattaaagaaattggcgataagaataccggtaaaaccacctacggctgcaataattgcagggccatagacgataacttgcatccatccggctagaaaaccaagaatccgaccatataacttctcaatgtaaacatataatccgccagtatatggcatttgagctccaatttcagcaattgttaaaccagctgctagtgtaataacaccaccaaagatccaagcactaatagctaaggttgaattatgagcactttgaagaactgaagcttgtttgaaaaagatacctgatccaatgattgtcccaataacaattgaaatagctgaaaagaagcctaatgaacgcttaagatggttttgttgtttcatcttgataatcctttctaaaagaaaaaagcccagattcacaaaaatcactctgctataaaagtgattaagtgaatctaggcttttttggaaatatttggccacacaaaatcactcatgttccactggaggtggaagatgaggaggaagaagcatttaaattagtgcagtgtaaatatttcatggttttaactcctaaatgattttatattagaatatcatgatattattaaaaagcaaataataaatacatctttaattaagtaattaattttattgtaaaaaagttttgctttttccaaaatcatctgctatactaattaacgttgtgagaaacgctgacttagctcagttggcagagcacgtcactagtaatgatgaggtcgaaggttcgaatcctttagtcagcacaatttaaaagtcctaaccagatggttaggacttttttgttgcgcttttatcttagtataatgaaaatatagacgtatattatctgataaattgatatttcaaaaaaatcttagaaaaggtaaaagcagatgaagctaaataaagatagtcaaactttagatcaaattgccccattagttgaatattcctttttaaaaactaatgaccttcatcaagatgttaattttttaagtagatatgaccatagtatgggggttggcgaatataaagatggaaaattagctagttacatcatggtcaatgaatttgaaagtagaatctttgctaaaaaggtaaaaatgggtggagttggttatgtagcttcatatccagaaaatcgcggtcaaggtgatattaatcgcttgatgaatgaaattattttagagttgtacaggcagaattatgctatttctaatttggcaccattttctgaaagtttttatcgacgttatggctatgaaaatgctatttatgaaaaaatgtataaattaaatccggcttatttgcgcttttttaagtcagttaaagaaggaaaaattgtccgaggaaaatggaaagattcagacttaaaagaagcagtcataaagttatatcaagataagctgaatcaaaataatcaaagaaatactgttgatcgtgaagactggtggtgggatcgtttagatacctattatcctgggagatttatctgtgtctactttgataaaaataatcagccagctggctatatgttctatcgtattcgggatagggagtttagggtgaaggagctgtactataaaacgcctcaagcagcgaaagccttattgagcattattgctagtcattcttcaagtgatttgaaatattatgtgaaaatgccagaatcaagcttactaggcgaatttttcccagagcaggaaggattaaaagttcaaattttaccttacatgatgactcgaataattaatgttgaacaagtattagaagccttgcacttaattaataccggtaaaattaaaatcgaaataactgatgatgaaatagttgctgaaaataatgggacttgggagattgatcagataaacaaagagactaaagtgagaaaaactgaaaaagatccccattatagcggctctttaactaattggacaaaagttttattaggtcatttaactttgaaacaagctgttcgattaggatttattaaggaacatcatctagtagataatgattttataaagggtgaagtttcgttttatgattacttttaattaaagatagattttctgttattagaagcagaaaatctattttttcttatagccggcaatgtcccaatctgtaaaagtataatctaacttcttcccataatatttttcatatgctgctttcttttggaggtagtcaactttacgcattttttctatattttgagcaagtgagagtttgggatcaggataaatagtaggtagaacatgaagaatccaacgtgttttgttaaattcaggatgcagtttttcttgcttgttagtgtccttaatttctacaaagcatgaaataattggaacattcattttagctgcataataataggcgcctttttgcagaggacgaggttttcgataattaagccataattcttgttctggatataccacaatccagcgatttttcttagaaaggattttatttaagtgttttggcagctcacgtcctaaatagcgaaaactagcagttaccgggatgctatcaatattcctcattaaaaagccaatccagtttggtagttttaaattagtatcttcgataacaaaatataatcgcttatgatatttcatggcgagccgcttcagagggagacaatcaaattgattgtagtgattacaggttacaatagctgaagaaagcttactaagagattcaggattatcaatttcagtatttaaagttaaaagaggcgttccgatgttaaggattccgcgtgcaagtatattaatagctttagaaaaggggctattatgattagcccaaaatttttctactaattttaggcgatcttttttgcttaaaactggatcatctggttcaacttttgcgttaaattttttctccttaacacatcttttaatattaaaaataacctcttgtcgctttttaccaataatcataactagctctccaaactttttaggatagattccaagctctattttatttattttgttttttaaaaccaaatattatcccacttatcttcattcatgctaagctaaggtgaaagaataaaatataaaaggaggaatccctaaatgaaagtaggtattattggtgcttctggaatggcagggagtgctatttataaattagctagtgaaaacaaagatcttgaagttacaggtattgtcagagataaagaaaaggccgaaagagttcttggtaaagatgctcaccttttaattggcgatgttttaacaatggacgatagcttactagaaaactttgatgtaattgttgatgcctttggtacaactcctgaaaaggcaaaggatcaagtaaagctagcaactaaattatgtggtctagctaagaacaaggatattagagtaatctttatcttaggtgcaggtagtcttagaactggaattgataaccacttggtagtggaagacattaagaaattaactggttcagaaaactggattaatacccctcaagagcaattaaacgaattaaactacttaaaacaagttgaagatgtagattggctgggaatttcaccagcattgacttttgaagcaggcccagaggctgcaggttatatgttaggtaacaatactcttctctttaataacaataatgaatctaaggtaacctctggaacaatggctcgcttgattgtaaatgaaattgctcatccaaagcaccataaagaaagaattactttagttgatgaataaaaaataaccgctacaacgctcagacgctatagcggttatttttatgtaatgtttaatttatacatgattaaaatgtaggttttacgacaataaccataaattctttcaccctttaaagatttaattttcatctctattatttattaatatcttgaagatgtaataaaatttgcatatctaatattaacttgcatatttaaatgttaggcaacaattctatataatttgaaaatcctgaaagcataagagtggtcttgatatgatctatagtagttttatctttttctaaaatggcttgataatatttgccaagcaatttatacatcaacagttctggagtactaggcaaactaaacaaaaaagatattccctttttccaaaaggtaaagttttttcttttataacataaatctaaaaaatttatacaaatacttgcaatgaacttttgaactgtttcatttttagttgtttgatatttatttaaaatagaagttagtagaaaagataactcatcagaagtataaataaacatagaattagtaaataattttaatgttggaattgaccaatttaaaccgttaaatagttcttttctgatgagatcttcatcctgtttatttaatatagtcctatcttgttttaaaagagcttcaattaattttatatataattttgtagtttgtgatgcccgtaagtatatatatttttttaattgcatgacagtgtctatatcgttattaaaaaatgcaataaatagtgtatctattatttcatcttcatcagtttgattatttagtttaatggttagttgatcaatgaaatcagatatattgatgtgatggacttttaaaattttaagtaaatcaatggctgaaatacgagtattatcctgttcgactcgagagtagaaagacgttgaaactattgttccggccatttctttttgtgtaagatttagtttcttgcgattttcttttagtaattctccaattgtcattattgtctatcctttttcagaaatgcatatatgcaattataatatagtttatgcaaatatcgatatatatttttgttttttctttatgatgtaatagaaattaaaagaaaggacataaaaaattatgcatagaattatgaaaaattaataatcaatttaagaagttaaaatgcttttaaattgaataggctaaaaaggctgataaatcaacgctttgacgaagattatcagctttttatttttatagagtttatgatgagtaaggtggtaaattatgttttacaagactagttatttagcaacaggtggctgtagtaatcatcaagggattttaggtgtaggaacgaaacaatactttgtaagtgaagccgactatcttaagtctttaaaaattttagattttttattaaataaaaaaacatatgatgaagttataaaattttgtgaaaaaaataatattaataaatctatatttgacacattagttgagcataatttaattgttaaagaaaatctttatgttgagaaaaaggatgatttaaattttaaaaataaactatattttcatgcattaggcttaaatggaaatgcacttgcaaaagaatttgcagatactacctttgtaattgtagggtgtgggggaattggaaattttatttcatttgctataggttcactatcaccgagaaaaatagaattaattgatggtgataaaattgaaaaaagtaatcttaatagacaatttttatttacagaaaatgatattggtaaatataaagtagatgttcttaaaaagaacttggttgagagaaataataaattaagtattagtgaatataaagagtatgtttctaaagaagtattacataatatttttgaacaaaataagaaaaataaaactttagttattctatctggtgacagtttttctgcattatctttaactgcaaaagcatgtgtaaaaagtgaaataccttttcttaatataggatatttaaatgatatttcagctatagggcctttttatatacctggtatttctagttgtccgttttgtcacaatgcgttatctatttctgatgacatatctagtggacataatgaaagcaaaattttagaagatagaatcaatgctaataacgaggcaccatcaagttttacaaataatgcacttgctgccagcatgggaatggctgatattattgagttcttatctcataattacgaacgtattaattctttaaataagagatttgggattaatagtgctacatttgaaaaatacgtattagaagtaaatagagatagaaaatgcgagatatgtagtcatggagaataaaaattatgagtcttttaagaacaagaaagaatataatagaatatttactttcatacgcactaacaactgtagcaacggctttgcctcatgcagttttgaccatcatattatttcaaaagggcctttctttagcccaaataatgatggttcaaactgcatatagtatagcagtatttatttttgaatatcctagtggattatgggctgatctttattcaaaaaaatttttatttgttttatcaagaatattactaataataatgatggtaattgttctgcttatgcggaatacaatctggatggaaatagcttggttcatctatggaatttcgagtgctttagacagtggtaccttagatgcagatataataaattctctaaaaaaagataataaaaaatcaaaattaggtagatttattagtattagtaatcaattagactttatatctttacttcttggaagtactattggctcgtggttatattatgcattaggaataaaattttattatataggaattggattggtaatattagctataatttcaatcctagattataaacaaaatgttggtgcttcaaaggaagataatataaccttggtcaaggaaataaagagtggtttaaaagaggttaagaattcgaaattaatgcaattaatgatggctcttacattttcaggccaattcttttttcaagcacattatcaattatggcaaggattgtttttgtataaaggtttcaataaacacaatttttatttattatatattattttccaattaataagtttaggcacttatagtataaatttaaatatcaaaaaaaataaaataaaaattattggttttagcaccatagtagtattatctttgtcaatgattctttttttgattactaaatcttattatttcgtttttagttatatgtttttaatctttatatttacactagttgaatattattgtaatgttatgttctcaactatagtatctgtagaaagaatttcatctttaacatcattacggtcaagtattggtagaattggagcaatttgttccatggtagtatcaagtatactgttaactaaactaaatgtacttgatgttgttgctattaattttggaatagcaatttttacaactttggctataggtatagtattgtatagtcgaaatagagaaacattattttcagaaaaagaggaataagtatattgaaatgattgaaaagtagaactaggacgtatgggtactaatcaaatcattttagttataaaaagtttaatcttgttaaatttagtttgtaaatgaaaaacagtaatagaaaagagtctgactagattaaactgttttaagtttaacgttacgttataactttctgtacataaaaaatgatcctaattttaattatttatgttgtctacttaggtaggatcatatcaggttaacaaaccttgatttaataggatgtttgtgtagaactaaagcccaaaatttattaaaaataataggaatgtctctcttgaaactaaggaaacaattgaataaaaaataaccgctacaacgctcaggcgctatagcggttatttttatgtgatatttaattattagcaactaatgaacgataaaagttagctttggtttgacggtagtaaggcacaatccagatgaatccaataccaaaagtaataatacccaataaaccccagccaatgaagcttaagtctaagacgaataagtccatcttgtgtccgtccattaaatgacgactttcagtaattgcttcagttgctcctatatcagtttgtccggcagcaaatttatcctttaagatatatggcgtcatggcataagaatatcccttaatgaaggcaggaataataaatgcgaataaccataaagtaataaaaagattggtcataaaaagagtaaacaaactattcttgaaacgtccattgctgtaggcactgaaaataccaacataccaaggctctttctttcctgtttcaacgaaatctaggatagtataagcaactccccataaaactaaaccagtaattaagccgacaataaatgtcgaaagatcataaccaggcttataaccttgaattaatgtttcattgttatagcgaagaattgagtaggtaaaatcttttccggtccagatccaacgattaatatccatgatgacggcgttaaataaccaggcaaaaatagttagacaaatagcccagccccaattgccacgtaattgatctttggatgcttgtttcatttgtgcacgtgtcatagattgctttcctccataatatgctaaatatatatccatcttatcttattactttgaatacagataggataaaattaaaatttctcaacttttgttataatcgaaatactaaattaaatcgaagaagggttgctcatgaaatataaacaattaatttttgacgttgatgatactttaattgactttgctgctacggaagattcatccctgcatgcattgtttaaatcacataagctgcctctctcatctgacttgcagaaacaataccatacgtacaatcaaggactttggcgcaagcttgaattgggtgaaattacttatgaagaattaagcgagatgacatttcatgactttattaaggaacatttcggtctagaagtagatggaaatgaatggatgaatgaatatcgctcttactttggtgaagctcatcaattgctaccaggtgtggaagatacgctgaaatttgccaaaaaacaaggctataagttaacagtcttaagtaatggtgaaaagttcatgcagcgccatcgcttagaattagcaggtatcaaagactactttgatttgattgtaacgtctgaagaagctcattattctaagccaaatccgcatgcttttgattatttctttagccgcacagagattgggccaaatgagactttattctttggggatggattgcagtcagatatcttaggtgctgaaaaatatggctttgacagtatttggtataatcaccgtcaccgtaaggataatattggacttcatcccttatttgaggttgaaacatatccagaatttgttaaattaatgcaaaacgattttaagaagacatattaaaaggagtgcttaagcactccttttgtgttactatttattctttttcaaaaccaaccattaagccgccttcttcagcatagaagctgcaaagtgcgccacattcgccgatagtaactttagcatctgggaagttatctaagataatttctttcatgcttaaagcagagccctcattttgcacatggtcaatttgaacgcggcctccgcgatagccagctttaaccatatcatctaatagttttcttctagccttcttagccccgcgtgccttacccaaaagttcaaattcgcctttattgttggcagttccgataacgaaaagctttaacaaaccagcaattttagcgacagctggagtaatccgtccattgttacctagattggttaaatcctgcaacgcaaacattaaatcaaggtgatgttgatattcttctgttgctttaacaatctcttcaaaagattttccagcacttgccaaactagcaatcttttctgcaagtagtcttaattgtggaccagctgaacgagaatcaaagactaaaattttagcttttggattcttttcatgataaattttagcagcttgggtagctgaattataactaccagagagtgcgctagttaaagtaatgacaaagatttcgtcgctaccttcaaaggccttaagccagtcatttacgtttggacaggcagaagttgatttgtttttagtatgctttaaggtgtagagaaatttatctaaatcaatatcaggcgtatctagccagagcttgctatcaacgtgaagtgataaaggaacagtaacatgatcaattccatcgatttgatcagctgtgatattcgcagttgaatctgtaataatttttatcggcatatagattacctcgaattaaatatattaagctgttttctttcagtctaaaataatatggatagtaaagtcaaagaaaatgctatcagtacaaaaaaggtcagcccgagagctgacccattgttaatgtgaaaatactagtcctaataagccgcctaaggcaactaaagccagaaggggcaatactagataagaaacgaaggcaaatagcagtccaatcacgattaagaaaccaacgatcttcaaaatgccaattcctagtttccagaacagccaaataattaataaggctaataaaagtgaaaacatatttcgaaccttcttataaaaatcaattatattttgatattaatcatattacgaattaaggagaaagtgtagataagtttttattaagaatatttaggataattttcgttaacgaaagttgcgttcaaatacgataaactaagaacattttaacctttttatctaaaaatgatgatagaggtgaagaaaatgaaatacttattgagatatttaaaaaaagaaccagtaaaggttggtatcgtaattatcctaacaattattacttcagctttacgagttactcatgctttaatcaatgtaaatattctaaattctttgatcaaattacagctgcataacttttttaactgggtaatgattgatattggagtatttgcaatcctatctatttttctgattttgcttcaaattcaaacagctaaaacaattgaatttttatgcttggatttaagaaaggatattgttcgccaaattactaataagccaattatgaaataccaggaaaaagatacgggagtctatgcttcctggttaactaatgatatgaatacaatcgaaaataatggtttttataatcttttacaatctattcaaattattaccgacccattattttcgattattgccttgctacaattttcttggacatttattcctttaattttactagtctcatttttaacagtttttttaccacaaattgttcatgatagattagctagtgcgagtttatcaactactcaagctaatgaaaatttacttagtactattaatgatggcttgaggggctttgcaacatattctatttttggcgttgagagacaacttgaaaatagaattactggtgccacgatggccttaattggtaagaaagtacgacaagcgaaatatcaagcagtagctaataatattgctggtttttcaaatattttaggacaaactggtattgaagcttggactggttttctagctctgcaaaaaagtatctcgattggtgtaatcggatcttcaggaaatttatcctacaatgtttttaattcattagctgcgattgcaccaatgtgggcagaaatgactgcattgacaccaatttttgaaaaatatcatcttgatgataaaagtaagcctaaacaaactggtagaacacttgaaaataatgattttcaatgtttagatattgagaatctacaaatttcttttggagataaaccagtttttaagcaaccattaaatttacatataagtaaaaatcaaaagattgctcttgatggcgattctggtagtggtaaaagtacacttttaaaaataatttcaggtcaaataaaaaattatcaggggtcagttaaaattaataatcaagatgaaaaaactctcagttatgatgccattagagaaacattgatttatgtggatcagattccatatttatttaacgggacaattcgttataacttagaattaggagagcactttagcgatcaagaaatattcgatgccttaagaaaagctgatttgcttgattatgttaaagagttaccagcaagattaaatacaaaagttggcgaaaatggtacaaaaatgtctggaggacagaagcaaagattagctttagctcgtggcttactaagaaatagaaagctatttttattagatgaaagtacaagcagtttagataagaaaagtgctttgaatgttgaaaatatctttttgagtcaaccagacattacagttatttttgttagtcaccagctacacgatgaaaacaaacagaaatttgataggatcgttaagatataaaagagacagatagatgaatgtactatactttcggtaacatacttacaaagtcactatatcctgcaagttttaaaattttagttatttgctgacaagtagccgtgtccttttgaaaaacagacgcataatattttccaagtaactttataaataggacggaccctttgctattaatggtcgaaatataagttaatacctcttggattaactttgtggagtttttctcgtagcaattatctaggtaattaatacagattgcgccaatgcattcttgcaaagaactttgcagagtatttggattagaatacttcgctaagatagtacctactaaaaaattcaactcttctatatcgtagatacgcattgtttctctaaaaatttgaagggaatgaatattccaattgttgttgacgagaatatattgtttcagtttattttttaattcaattggaatttctttagctttaggaagatagacctctaaagtaagctgcaactgcaatttataatattcagtttggcgattattaggaagtaaatctatctcttgttttatttttaataatttatctttgcttttttgctcaaaagctacagaaattctatccataatatcttctgagatattttctctttcatttagattttcaaaaaaataggtagcgtttatctgatgtttattaagaatttgaaggagatcgttagtcccaatatcgtgaatatttctttcaactttcgaataaaaagaggttgagactacatttgcagccatttctgtttgagttaatcctagttgtttcctaagatttagcagtgcttcaccaattgtcattctgtatacctcaaattcaattttttaataataattttatttaatgcttattctatcacgttataggatgataataatttcaattgcgttaataagctataataaagagaaattacaacaaaattattacgattacattgagaaaactagaataatgaaaaaactaacaacaggaattttagcccatgtggatgctggaaaaactaccttgtcagaagggatgctctacaaaagtggcacattgagaaaattaggtgcagttgataaaggaactgcctatttagacagtgatgatttagaaaagaaacgcgggattacgattttttcccatattgcccgtattcaaaccggtaatagtgaattacaaattttagatacgccgggccatattgatttcgctcaagaaatggaagagacgttaagtgttttagattatgccatcttagttgtatcagccagtgaaggggtaactggatacacccgcactctttggagcttactaaaaaagcatcaaattccagtttttatctttgttaataaaatggataccttgaaggctgataaggagaatattcttaagcaacttaatgagctggatgacaattttattgagtttggtaatcaagatgcagatttttatgaaaaagtagctactgcagatgaaacaaccttagatcaatatctagaacttggaaaaatagaagatagtgcagtcaaaaaattaatcaatcaaagaaaaatttttccagtatattttggtgcagctttaaaattaattggaatagacgaatttctagcgggcttagataagtggactgatggaaaaaagtatacaaatgactttggagctagaattttcaaggtttcttatgatgaaaaaggcgaacgcttaacttggttaaaagttaccggtggtagtttaaaagccaagaccgagatatttcctgacgaaaaggtgaatgaaattcgtcgctataacggcactaagtatcaagtcattccgcaggcagaagctagcgaaattattgctgtcagcggcttgaaaagtacttatcccggacaaggattaggctttgaaaatgatcagactaattttactgttcagccggttttaacttatgcagtaaaagttgactcagctaacacaaatgcttgtttgcaggcattaaaacagcttgaagatgagaaccctcaactacatgttaagtggaacaagcagacacaagagataagtattgatgttttgggaaagattcaattagagattctccagcaactattacgcgatcgctttaatttagaagttgaatttactcagggcaagatcctttaccaagaaagtattaaagcttcagttgaaggggttggtcactttgaacctttgagacactatgcagaagttcacttgttactcactcctggtaaaaacggaagcggcttagttttcaaaaataattgtagtttagaagttttgcctaaaaaatggcaagatcaagtgatggagagtttatctaataaagaacacttaggtgtcttaactgagtcgcccattacagatcttgaaattactctagttggaggccggggaagcaatgttcatacagttggcggagattttcgtgaggcaacttatcgtgcagtgcggcaaggattaatggagctaaaggctagaaaacaagtttatttacttgaaccttggtaccaattcactctaagaattaatcaggatcaagttggtcgggcgattaatgatattgagagaatgggtggaaaatttgaactcggagaaagtagtgggaacgtcactacgattagcggtcaagcaccggtagcgcagatgcaggattatgctactgaagttagaaactacacgcatggtactggacaactagaatgtttattcttgggttatcgagaatgtaaagatagtgctgctattattgaagaaatggcttatgatccactatctgacattaacaatactcctaactccgtcttctgctcccatggcgcaggtcatacagttctgtggaatgaggtaccaagtcatgcccagtatccatatttaggataaattgctgcacgattttggtagatcaagctaaataatttttgcagtaaaacgctttcattatttatgaaaaggtgccatattaaaagtgtgaaatagctctagtagaagtcacgattaggattgttaatatttatattttttattaagtcgacgatactctagctattgcaattcataaatatattttataagaaaaggaagttctgattaatgaacttccttttttggtgctaatagaaatgtagttaaagtaactacttgaatcccatttgcttgcgtaggaccgtgtagattggttctccacctaagagagctagaattagataggcaataaagacactcataatcattggcaaaacttgttctactgttccgatcatttctgtcaacaaaataattgcggtaaatggggcgcgcaaaattgctccgaggtaggctgccatagagacaacaatgatattagtatagttgtcagtaggaattaggcctaagtgaataaatatagtcgcaaaaatcgtccccattaaagcccctaaaactaaaatcggcataaaagtaccaccaggaatagaactacaataagaaatcatagaaaagattaatcttagtagaaagaagacaactggaattagaatccaggaaagttgccctagtttttcttcttggataattaaaggattgtgaaagagtgaatcgatcaagtaatgtgatccacccaaaacatgaggaaaggcaagtccaataggaataactaatagaagtggaacaatactgtgatattgtatgggaataatttttatcttgctaaaaagccatttagtatttaaaagagaacgttgatatccatatgccattagcccggctacaattccgatagtaattaatgaccagtaggagtgaacgggcaattttttagcaatgggaagataaagacagggacgcgttccaaaaaatataatagtaactaagtcagctgaagcagcagcccctaaagcgctgatgcattctttagggttaaaagaatgggtaataacttcaacaaggaaaaaaacacctgcaagtggagctgagacggcggcactaaggccggccgcaattcccgcgcattgaagcaaacgtctatcttcttcactacattcaaaaatattttctgcaaaaccttgacctactaaagcacccatttgaatacatggaccttcgcgaccaagaaaaagtcccattgagcttactaagagaccacctacgaattttcgccataaaacgggaaaccatttaacttcgtgttctcccattaatgttgcttctacttgaggaatacctgatcccgataggtctagtaaatatggtttaataattttgctcacaaggatacaaataaaaaaagtaaaaattgtatatagaccgatccattggggatgggatgccatgtagggatagagaaagtataaaaaatgcatgcttttatcgataacaaatcgaaaaatactgactatcattcctataattaatccaataatgatgctctgaattaaaatctgtggcactcgggtagtaaaggggcgtctaagaaaatctttagcaggcttcataattgtgacttctttcatgtatacgttgttaggtttattgtatgccgaaagaagaaaagaaaacaaataatagatggcaaaagagccctactagatcaatgattttgatctaataaggctcttttgcactgaatcacctgtattcctaaatgaccagtctaagtgtatgtgcagctcaaaaaagaggtacgttgatgtgataaagagtgagatctgaaactactcaatacgtaatttctatttaaatataatttttagctaaatcttccttgctttttgtcctaaccaaaaatttccagtaaaatttacttttcttaccaaatatgaaccctcttttcgggatcaagccacattccgttggctggctggatattaaaagtttgatagaaatcatcaatgcactgagcaggtacatttgatctgagttcacttggggcatgagaatcataggcaatgactgattttctaaattggggcatcatcttaccacgccaaattttagcccatgcttgaaatacctcttgtagattaccattttcttttttttgcggtttctacagcaacagttaatccacctaagtcggctacattctccccaacggttaacttgccattagtcttaagaccaccacaaataataccatcaaataattctatttcagcttgtgaaagttcagtaaatttgttgtaatcttcttcactccaccagttacgaatattaccaaattcgtcaaatttagacccgttgggatcaaaagcgtgggtaatttcatgagcaattactgcaccaataccacctagattttcactcaaggtattatctgaactataaaacggcttttgcagaattgcagcggggaaagtaatatcattttttgttggatcatagaaagcattgattaaatttgctggagcacctggtccccaaagagtccggtcaactggtttatataattcattaaaactatactgtacccatgtcttattagcagcagatatattttcagataatgatttatttgttgaaacttgaatgtcattatacacgtcactaattttatcgggatagccaatttttagggttatatgatcgagtttttttagtgcttcatttttagtagattcactaagccagctgttatcttgcaatctttgcttataagtttcaagcattttattaatcatttgctcaacattagcttttgcggttgagccaaaatatgattgggcgtaataaataccaatgacttccgcaaagactctgttagcaaccctgtaagcttgtttttctgtagaaggtaattctctaacaccctctacagcctgcttgtagggaaaagcagccttttgaaattcttccgaaagataatcagcggaactattgacaaattttactaatatccagcttttaagttcttcgaagttttcgggattaacaagttcattaatgtgctttaaataatctggttcgataacaataattttttcaggtactttagagaaaaggctatttaaaagctgctctatatctaaaaattcgaaagaagaagcaaattgttgagttgaataagcattatacatgctagcaaaatcatttatttcttcttgagattttttatgtttggctaattttttatcaaatcgaactgcattagtggcaatttgtttactgtcttcagaactaagaccggctagagttaagagcttagccgattgcttttcgaaagtgttcaataattcttcagaagaaggatccttataagcggaggcatctggtaaaaatgaatttggtgaggcaaaatacaaagaattttgagaagtatttttcatatccgcatctacataaaaatagaggggtaaggaaaaagcatctttaattaattgagctaaattttggttaaaatcagagaatctagataaagaaagcagcttttggagatcaggtttgattggttgagcactatcagcatttctcttatcaaaatctaaagttagcttatacaaagtgatagctttgtccaaattatctaagtccggcaacttcttcttattaaaagcgaagttatcaaaatccttcagaagttgttttctaattttagtgtctaattctacgaaactgtccataagtggacgatcggctggaatttttgctttttcaagccactgtgaattagtagctaagtataagttgtcttgaagtttaacattggtatttgctacagcagaatcacctaagccaccacgaattctaaaagtattcataattaattactcctttaaatttaattgttgaattaagtctaacaaagaattaatattattttaataaaattcgtattcgaattattttgaggtgtaaaagatgactattggcgaattgcttaaagactatcgaataaaacaaggtaaaaatcaaagagaatttattgctggaattgttagtcagtcatattattcaaaagttgaaaaggagatacatcgaattaccgcagatgatttgttggaaattttaaatcataacggaattccagttaaagaattttttgaaaaattagaaattgatccaaatcaatggcagattgataaaattaataaactcatggaagaaataactaaagctagttattcggagcaggcaatagatcaaataagaaaaatcagggaaaaggtgaaaaagttagatttgaatccagaattaaaagaggaggctctattaataattgacggatttatagaattagaaaaagatgatccagaaacttttgatgaaaagttgagaactaaattaaaagaaaagatatttatgatgccagaatataatacacataagctgtctctttatgctaattttatagatttatatgattttgatagcaatttacaaataataagacagataaataaggtattagaaagaaaaccaatagagaggcaagaagagatcctatttgcaattgtattgaacgtattgggacaagctgttaaagagaaaaagtatgataagacagatgaaattattaatttaataaatcaaataaaagtaatccccgaattctttttttatcgtgaaatgctgactttttatgaagaattgattacatatcattttgataaaaaacaagagcatataagaaaatgtaagttgattttagaaagctgtgaatggggtgggatgcaggtatacggtgaagaaatgaaaaaattttttgatgaatataaagatcaataagtcaaaaaatctcttgaatcagcacgactcaagagatttttagatactataattttttcattagatgttatatgtgaaaaactctctttcttccaaaaaaattcaaatacgactattttaaaaataattttaattccttgataatattaaaacaacattaaaacatatgaaaaacggagttaaacattatgaacgtatttttgaagaacaaagattatagaagattttcagtcgctagtttcttatctagtgctggtgacattcttttttacttagcgtttatgacttatgcaagtaaattacaaaattattctcttgctttatcattaattgcaatctctgaatcattaccaagattattcgatatctttggtggctacttagctgatagaaccagaaaaaaatttaagaatatcttcttaatgtctatagttagatttggcctatatggattagttggggtattgtttattaccaatgtatctcaatggggcttagtaattgcagtagtaattattaactttatctctgatatggctggtacttatgccggcggtttaggtgctccattaattgttgatttagttggagaagatgaatttgcggaagcagaaggctttaccaatggtattagtcaagtgattactactgcggctcaatttgttggatcaggattattacttttcttgtcttactcaagcttagctttcgttaatgcatttactttcttagcagctggcttgttatatgctagtgtaggagttcgtcataataaagataatcagcctattgaaccacaagaagtaaacgagcaaaaattctttgcgacaatgaagacctcatatactcaaattaagaaggcttcaggcttgttgtcagttgttttagtaattgcacttcttaacggtgcattaacttctatgggttcattattaccaattattatggcaggaaatcgttcaacaatgattatttccacttacagctttactcttgcagtaattggtttggtggtaagtgttggtgcaatcttaggtagtacttttggaccacaattatttaaaaagcaatctgttttctttatggttattgttgctattgttttaagtggagccactacagtagctgcagtgtttgctaatatttttgccattatgccattttacttcttattagctttagtagtaagtactgcttcgcttaaaatgcaacaatggctagttacgacaattgatcgtaagattttggcttcaagtgtaggcttacttaatacaattgtcatggctacttcaccagtaatgactaccgtgttaacaactatttcaggcttaggggatgttagatacgcattatttgtactcttagcagttgaacttattattttgtttgtcgcagttaaattgagtgttaagactaaagtaaacaaagaggaagttaaatccgctgttgtagtaaataagtaacttataaaattaaggtttaactaatgacgcagcgcttgggaatagattctctcaatatcttagggatacttgtcaaaaaaattctatcgtaaattgcaataataaattgaacacttaggctgcttgatagatttgatctaattctctttcgaagatttcatctggtgtgtggtatgccaggatctttcttggtaatgaattgcaccaggtttcaatatcaatgatctgttggagagaatagttattgatgtactctcctttaggaatgaatctgcgaataaggccattgtgcctttccacagttcccttatcacaagaagtattggatgagcataataaacaagagtcttagaaacctcctctaaattagctagatccgcaaactctgaaccattgtcagtagtaatcgtcttgaagatgtcattccagtgctcgctgtattgtttctgaagcactttaaaagctcgcatgacactggcaaatgtcttgtcaggtatgcaaataatcaagaattcacggctcatgcgctcagaaagtgttaatagaacctgatcgtccttggtcttatgccctaaaacaagatcgcattcccaatgaccaaattcattacgctggtcaatctctttaggccgctcttcgatgcttcgtcccagctttttcttgtttttgcgaacatgatggagcttgatattgcgtttaagcttttcaggcaaatcatagtttttgattgtcatcagtccttgatctacgtagttatacaaggttctggtactgactgtttgatgatgcgagaattcaccgatagctaagctgcgattggcacaaacgtcaagcgaccagccgtcctcaaagaaatgcttaatgacgtagctaataaagtctgctttcttcaagaagtccgatttgcgaccgcagtggcgacgattaacctgataaacgctttgaccatgatcagccttatagcgctgctgcttgccatgatagagagaaacagtgccacgtttgacctcatagctgatcgtagaaggagagcagccaagttctcgagcaattgctctgatagagtagccgtcttttaagcgagtttgaataataactcgttcttcaaatgacaagtgcttgcctttaacgtgttgattcatggtagaatgtaaagagtccatttgtgacctcgtttttaaatgttgtgtggtaactacattctatcaaacaggtccagatggacttttattttttacaaagtgttcaacttaattttacaatcggcgaattattttagataatttttcctccgtaaaaagaatgatgaaataatagctaaagcaagtccaaataataatacccataaaaatccgaacttattttctttgcctggcaatccacctacgttcattccccaaatactactaattaatgcagggattgagataataagtgcaactgagtcaagatacttcattaggttatttaagtgattatccatcattgctgaaaataatccattaattgattctaaaagatctcgataaactttgatttgcttagttattcgctgttgtgaaagaattagatcaatgattaggattgagtcagcaagatgctgttccttaaaaaactttgtgagggaattgatagatgtagtttggtcgttcattgtgtggttaaagtaaactagcgttttcattaaatcagttgcttgttttaaggattgagtttttgtgctagtacgtgctgcatgatctagctcatcaatagcttgttttatgttgtctaattccttgttaaattgatcattttgatatagcaattgtttaattaaaagcacttcaactgaaagtttagtaattgaagttttatcctgaaaaataggtgtcggtgatttttgtaaaattagtattaaatgttgagaattaaatatggcaattgttgggtaaagggagtcttcaatttcactttgtttagggtctaaattaaaggatacaaaaatatgtgcaccctttaatttacagtcgggaagagcgttaaagtgagatacttcagttgcagaagtttgcttagtgaaaatatgcgtatcacaatttattgttttttctagatggtttaattcagcagcagtaggttgaactaaaattataagtttagctgataaaagatcatgtgatattaactgcccctgattattgtacatagtaagcataaaataacctcgtactctcaaatttttagactaaatatatcataaagagaaagtataagtagatttaatgcctagtgatgaattatatgtttacaatatatgtatagaaaatattaatttttaattaatatacataacaagttattaaggaaatgttaagcttgcagagctgtaggcagtagaatatctttattgattagctcttgttatgattaagttaatcaatcataagtcatataaagattaaaaatagctagctaaatcaatcttttatgtatttttaggaaaggaagcctaactatgatggaagataaacatggaattaaagacaaagtagcaggtaaacttaaagaagtagaaggaaaaatcactggtgataaagctcgtgaggttgaaggaaaggctcaacaagctaaaggaaaggtgaaatctaaggctactgaagtaaaagaagacttagaataatctacttattgtatattttagaaataggaggcgatccccatgcttcactggatttgggttttgattgtcggaggcgtaatcgggttgattgcaggagccattactcataaaggcggctcaatgaactggattgcaaatattattgctgggctagtaggctcatctctaggcgaggctttgctgggtgcctggggtccgcaagtagcgggaatggcaattgttccatcgttactaggagctattattttagttatcttagtttcatggattatgacaatgctatttgggtcaaaagctcattcataaatcatatttaacacaatttaaaaattctctctcaaaagagcagtcttagtcgactgcttttttctatgggcggccttttaaattttcatagtataatggatgtgatataaaaatctaggtaagaaaagagataacaatgcgtttaatttcatggaatattgactcccttaatgccgctttaactagtgattcaccgcgtgcccaacttacgcgtagcgttttaaatacaataaaagaaaaagatgccgatattattgctattcaagaaactaaattacgttctacaggtccaacgaagaagcaccaagaagttcttgcagagatgtttcctaactatgactatgtctggcgttcttctgaagagccagcaagaaaaggctatgcagggaccatgtttttatataaaaacactttaacgcctgaagtaactaagccgactattggcgcaccggatacaatggattatgagggacgaattttaaccttagaattcgataattattatgttactcaagtctatactcctaattctggtaatgaattgaagcgattagaagatcgtcaaatttgggatgaaaagtatacagaatatttacaaaaattagataaaagtaaaccagtaattgcgagtggtgactataatgttgcccatactccaattgatttgaaacacccagaaaataaccatcataacgctggctttactgatgaagagcgtcaaggctttgataaattattgaagcttggctttactgatacctttagaaaggtccatgggaatgtagaaggtgtttactcatggtgggctcaaagagtaagaactagtaaagacaataactcaggctggagaattgactattacattgtttctgatagaattgctgatcaggtaactaaatcagaaatgatcgataccggagatcgcaaagatcattgtccaattatgctagaaattaatttataattatccacttgtggataagcaaagaagatcgtttaggtcttcttttttaatttagatgggaagtgaaggctgtggataacgttttaaaagaagcaattttaaatggtttatacgataaggataagaataatggcaatgaattcttaagtccccagttagtaagtaatgatcaagagaacaagatatggtttactttgcggcaagaattactgtcagctacttcttttacttgggcagttgcatttatttctgaaaatatgcttgttccatttaaattagtgatgtcggaactagctaaaaaaggaattagcggtacgttaattacaggtacttatcttggctttaatagtccgaaagttttcaaggaattaatgaaaataccgaacctgaaagttcggctaagtgaagaagctggttttcacgctaagggatatatttttaatcatgaagattatcaaactattttaattgggagtgcaaattttactaggtcagctttattgaaaaattgcgagtggggattaaaagtaacatctcatgaaaatggccaaatagttcaagaagttaataatcaaattcaaattgcgttgactactagcattccgcttaccaattcctggattagagaatatgagaaaaattggcaacctgtcaaaaagacagctatgcatttggcaactgatcggaaagaagatattttacctaataagatgcaaaaagcagctttaaataatttaactgctctagtaaatgaggatgcaaaaagagccctggtcgtttctgccactgggactggaaaaacatatttgggagcatttgcagttcgagaatatcaacctaaaaagtttctttatctagtacatcgagaacaaattgcaaaaaaatctttagagagtttttataagataattggcagaagtcgtgaggactatggtttattaactggaaataagcatgattttaataaaaagtatctttttggaactattcaaactttaagccaggacaaagttttagcgaaattggatccaaaagaattcgattatattttaattgatgaagctcatcgagtggccgctccaacttatcaaaaaattttagaacactttacgcctaaatttttactaggaatgactgctacacctgaaagaatggataagcaaaacatctatgaagtatttgattatcacttagcttatgaaattaggctaaaggatgccttgaatgagcagatgttaacaccgtttcactatgtgggagtagaagattatacggtaggcgatgaaataattactgaaactagtaaattaaaagacttagttgctgaaaagcgagttgattatgtccttaagcagcttgattactatggctattgcggtaaaaaagctaaaggcttagtattttgcagtcggcaagaagaagcacgaaagttagcagaattatttacgcaagcaggacaccctgcacaggctctgactaatgaagacagtcagaagaaacggatagaagtaactgagaagttagaaaatggtgaattagaatatatatttaccgtagatttatttaacgaaggaatcgatattccgtccctaaatcagattgtgatgctccgaaatacccaatcgagtattatttttattcaacaactagggcgtgggctgcgtaaatttccgggaaaagactatgtaactgtaattgatttcctgggtaattataagaataattatctaatcccaattgccttaaatggtgataagagccgtgacaaagaccaagttgttagagaaagtaaattaccgcaagttatcgatgtttcaacaattaactttactgaggtagcttcacaaaggattttagattcacttgaaaaaataaaactagatagcatgcgggaactaaaaaagtcctacgaagatttaaaggcaaaactgggtcgcgcacctcttttatatgacttttatcaatatggaacaaccgctccaactgtttttgccaaaaatcaccttttagcccactatggcgattttttaaagaaaatgggagaaaacgtcgagctaacagattatcaaagttctgttttatcctttgtaactaaggaattgttatttggtaaaagaccccatgaattattactcttagaaagctgtttaattaaagaaaaggtaagtgaagtatcctatctggaattacttgaaggaaaaaattgttacgtaaatgatgctgtactagattcagttgagaaagttttatccttagaattttttgacgtgaaacagggaaaaacaacgaaaaaagagcagtatggaaatgttcctttagttgaaaagaccggaacgcactatctattttcaagtcaactttcacaggccttaagtgataatcagcaatttaaagacctatttaaagatgtcataaaaacaggcttggcgctttcaaaagaatataattctgatcaacaatttactctgtataagcaatatgatcgtaaagacgtttgtcgcctcttaaactggcctaaggacgtttcagcaccaatgtatggttatcgtgttggtgaaaaagaaacgccaatttttatcacttaccaaaaagattcaaagaagaagagaagtgcccgctatcataatactttagaaaatggacatagtttgcgctggtatacccgtacgccgcgtcacattgattcagatgaggtaaaacggctgcttaatacaaaagatatgaaattacacctatttgttaagcaaagcgatgcagcgggaaaggaattttattacttaggtactgccgatatccaaaaggattctgttaaagaagaaaaaataggtttaaagcaaaagagtacagttggaatgaatctgattctcaagcatccgttaaatcaggcaatctatgatttgcttttcagttaagaattaagcatagtttaggataaattatagaaattcataataattatttgataaattttaagttgcgaaaatgaagggatgagataagagtgaaactaaaactagtctctttaattacgttattagcgttagttttgacaggatgcagttttcaaaacaaacctaatagagctaatgcagcacataaatactatgttgaaaaaagtgaaacgccgaaaaacaatctcaatgtaattccaacattatttttccatggtggactaagtaattatcatggagaagagaatatggtaaaagctgctcaagaagctggagtgactaattcggtcattagagccgatgtaaatgcgaatggaaaggttaaactgattggtactattccaaataacgctgttaatccaattgtagaggtaaactatcgaaataacgttcaacttgattttaaagaaaatggacgttacgccagaaatgtagtccagactttacaaaatgagtacggaattaagaaggtaaatatggtgggacattccctgggaaatacttcaattatgtatttctcctgcaagctgcccacaatccaaatttaccaagattaaataagcaagtctcaattggtggacattttgatgggcttgattttaagcagctgccaattgctattagacagcctgctaatcttcgagttaataatgaaggaaagccaaataaaatgaatgccacctaccgtgaaatggcgaaattacgaactctttatccaaccaaagaaatagacgtcttgaacattattggtaatgttggtggaaattcggatgggattgtaaaaaatgcttcatctctttcattagaatacttagttgctcctatggctaaaagctatcgtgtagtcacaataactggcaagaatgcggaacatggtcaattaacttataataagcaggtagagaagcagattattaattttttatggctacaataacaaaataaaagaagatgtttgaaacatcttcttttttaaatcttattatcatgatgattctttttatcaaaattgtgaagccagataccccatgcggcttgaaattcgatgattaatacgctagcagagatgagtactaagagaattaaggcataactagcggtttcacctaattcagaggtatcaaaaccatatgtaaagagtttaccgcctccatacataatcaaaattatccaataaatatttgctagccaccataattttctcatttagataccgctttcatttcctatatatagctattgtagcactcttataggtacttaaaagtttactgcaaggctattaggagaaagataagtgtataataagtagaaaatagagaggcaagtgaactaaatgggacaagcttgggataaatttaaagaaaatacaactgtgcatcgtcttgtgaccctctgtttaattattctcgttttatatgcagctcgctcgatgatgaacaccatcttgctaacgtttatttttacatatttaattgtgcatttaattcgatttactcaaaagaaaattcctagcttacccgcgcaggtaattgtagttcttgcttatctcttagtaattgcgattatttactttgcgattacgatctatgtgccaattttaattaagcaaattataaaaatgagttattctctgatcaaattctatcaatcagatgatatgaactgggtatcacgctacttaagtcattacattagcaatagtgaaattacaacacaggcaaaacatggtgtaactattctagttcatgctttaactaattttggaacattaactatagcgttctttatgtcgctgatcataagctttttctatacgattgagcttaattcaatgactgaattctctcatacttttttgcagagtcgtcacttatcctggctatttgaagatgtcgcatattttggcaataagtttgttaatacttttggtgttgtcttagaagcgcaattttttattgctttatgtaatactacgatgacaatgatctgtttaattattatgagaatgccgcaaattatagctctaggattgatggtatttattcttagtttaatcccggttgctggggttattatttctttaattcccttgagcttagttgcttattcagttgggggactgaggtatgtaatctatatctttattgtgattatgattattcatgccattgaggcctatattttgaatccaaagtttatggcaagcaaaacagaattgccgatcttttataccttcgttgttttactagtcggagaacactttttgggaacctggggtctaattgttggtgtgccgatctttacatttttactagatatcctcggggtaaaatcagttaaaaagaaaaagccgcaaattttgaaaattgaagataaaaaataaagcagctgtaaaagctgctttttgtgtattgtaaatatgattgtaggatatatgagattatgaatggagtttggttattcacaatacactattaattacgcaaataattgtttttttataaaaatcccgagtacttatgatagcggtctcatgtaactttttgataaactgaaaatgaaagaaagatatgaggcgacgttatgaaaaaatatgattatataattttaggaactgggcctgccgcttataaattagttaagctcttagatacacaacataagtctattttaaccatcgaaagtggtttgtttggtgggacttgcccgaatgttggctgtgaaccaaaaatatatttagatggagcagttcaagcagttttatcaaatcaacaatttgaaaaagagggaataatttctcaaggcggaaaattaaattgggctcaactaatgaaagacaaaaaggcacgatttgcaagctggccaaatgaaacaagaaaaaatattagtaaaatcagtgatgtaattagcgggagtgcccattttgttgatcgacaaacaattgaagtaaatagacaatatttccagggaaatagaattataattgctaccggaagaaggccccatgagctctcaattccaggagcgaagttcttacacgatagttctgatgttttatctttaggcacattacctgaacacactacttttattggcggtggttatgtagcaatggaattagcgacatttttagctgctgcgggtagtcaagtaactattttagtgcgaggagatcgagtattaaggcatttttatcaaaaatatagtcgtgaattagtagttagaatgaagcaacgaggcattcaatttgaatttgaaacggagccaactcgaattactcaattaagcgataaatatgttgttgaattgaatcaagacggtccaattgtaactgactatgtagtgaatgcgagtggacggatgccgaatattgaaaaattagatttatcagctgctcaaattgattattcaactcgaggtattgatgtagaccgccaccttcaaacgaacgttaagaatatttatgcaattggagacgttacaagccaagatgtgcccaacttaacaccggttgcagaatttcaagcacaatacctctttaattctcttgaaaaggggcttactcaaccaattaattatccagctattggaacgggagtatttgcttttccgcaactagctcaagccggaatcaatcctgatagtgttcttgaagatggagataattttgaaattagagaatacgaactaagccaaagtagtttatatgctggtcaaaaggagaagggcttgttaactgtcgtttatgataaagccaattacattgttggtgttagtgaaataagtatgagtgcagttaatgatataaattattttgtaccaattattggtctaagaattaataaaaatgagtggcatcgaaatgtgttgccaatttatcctgcactggccgataaaattgaaggaattttgagatagaaaaaagcaccttgtggtgcttttttattacaaatctaaattttataagtcgctaccgccatagtttggagcttcttttgccatttgaacatcgtgtggatgagattcacgtaaaccagcattagtaatttgaacaaattgactattttcaattaattctttaattgtacctgcacccacatatcccataccggcacgtagaccaccatcaatttggtagatgatattggaaacatcgcctttataaggaactaaggcttcaacaccttcaggaactaatttatttgcttcattaactccaccttggaagtaacggtcagatgatccatgttgttgagacatagcgccaactgcacccataccgcggtaggatttgaattgtttgccttcattagtaaagattgttcctggagcttcagtagttcctgagaacattgaaccgagcattacagcatttccacctgcagctaaagccttaactacatctccagaatatttaataccaccatcagcaatgattttcttgccatatttttgtgcaacactagcagcgtcataaatagctgtaatttgtggaactcccacaccagcaacaatacgtgtagtacaaattgaaccaggtccaattcctactttaacaacatctactccggcatcaaatagggcagcagttccttcgccagtagcaacatttccagcgatcaatgtagcattaggaaaatgctcacgaatttctttgattttgcgtaaaacgccagcggaatgaccgtgtgctgtatcaataacaattgcgtcagcaccagcttcaagtaaactttcagcacgttcaaaagtatcacttgtaacgccaacagcagctgcagctaagaggcgaccttgatcatcaactgcagggtgaggtaagttaggatctacagttttacctttagcttttttaacttcttcaacttggacttcgattgaaaggtttttatgaataacccctaagccgccattttcggccatggcaattgccatgtttccttcagtaacggtatccattcctgcggaaatgagtggaatatgaagttgaagattgggcgctaatttagtatctagtttaacttcattcggcagcacatgactttcagctggaattaaaagtacatcatcaaaagttaatccttttttggcaaattttgtttcccacaaactcattgtaaagtcctttctttagaagcaacgttttaatattaaattagctaaactttactcgaatatctggcagaagtcaattagaaatttgatttaatttttgaacaattaattttgcgagtagttcatagcccttaacgccaaaatggagtccatcattctttttaccattgaaaatttctggaaaatttttacttgcctgcatcttacttgctagagcaataaataaaaatttatattcctttgtaacgcgtttgattatgttgctatattcctgcactaagaggttatttcgcactttttgcttattttcatcaactgcaggtggggtaacaaagataacctttcctgggtaataacgccaaataatgctagaagcaattaattttagattatcctcaaattgttgtaacgggacttgcttgtgtactgctaagtcattagtgccaactaaaatgatcagataatcgcattttggctgattgaatactaaattgggtaaagagagggcaagaccaccagaattgattcccgagatagctgtattgtaaatctgatacgaatttagtttttgcaattgaaagttaatttctggaatagaatgattttcagagcgtgcaataatactgtcgccggtaagaagtaatttcattaataaaaaatcctttagggtagaaaaaagaccttgagaaaatctcaagatctttttgattatcataatttgatttttagaacttgttcttgtccaaagcaactggagaatctggtttttcaccgttgatcatctttaagttgttgtcaaatgctttagttaccatgttacgtacagcatgagtagtgtagaaagcagtatgtggagttaccaatacatttggacgatcgattaagtcagctaaacgagcatctgggaattctttaccttcccaatcttcgttaaatacaccaacttcaccttcgtaagtgtccattacgaaaccaaagatcttaccagaatctaagccgcggataacagcgtcagtgtcaacaagtggaccacgtgagcagtttacgattacaacgccatctttcatcttagcgattgattcatcattaatcatgtgaacgtttgctggaacatctggaacgtgaagtgaaattacatcagcttgcttgtataagtcatcaagtgagtcaacgtagtaacccttcttttcaagttctgggttcttgaagatatcgtaagcaataacttttgcgccaaagccttccataatcttcataaatacttgaccgatgtgaccagtacctacaacaccaacaacttggtcacgaacttcacgaccaatagtaggtgcccagcgtaagtcgcgcttagccatcttttcatccatacgcttatcttgacgtagtacgcgagcagcttgaattgcagcatgttcagcaattgcgtcaggagagtatacaggaacgttagtgatttcaaagcctaattctttagccttgtccatgtcgatgttgtcaacaccaacgttacgtaatgacatcttagttacgccagcatcagctaaagcttgaagagtttcaggagtgtagtctaattgttggtaaacaacaacaccgtcagcacccttagctaatttagcagtttcaggggctaaaagcttgtcagtgtattcaacttcaatatccttgtgtgcatctttccattcgtttaagaaaggttcttcatctttacgaatagcgtaagcaaaaatctttgtcataaattaaacctccgtcaaaattaatagtatgaccgtcttttattatacacttgagtttgttaataaaaacacaaaatctaatttttttgaaacttcttttaaagatgtttcatgtgaaactattaatgttataaaaaattaattttcttttgattatgaatatagggtgccttatgataatgattagggaaaaataacgataagtaagctactaatatgttattaaaatttgatcaagatagatgagggaataagtaatgtcagttgttgttaaatatgttgacctagatgataatttggttgaacttgcaaattcaggagagctagagggaagagtaggagaaaaagtagattatagtacaaaagacgaagtaacaaaattactagctgctggttatgtgctgattaataatccttttgatcaaaacggtgaaataaatttttttaaaaaagattctcaagaatttacgatcacttttaaacatggaaaagaagaaataacagccaaaaatttaaaatatggatgtaaattagaggatgttcaaatgaaaggtgaacaaagagttcactatattggacttgaaaaaaatattcctgataaagttactgagattgcttttaatcgaaagattatttttgacaaagttactaagcaaaaattattaactaatacttggcaaccagaaaaatatttctttcctttagttgcaagtcccagtgttatgaactatacacctgataaggcagtaattggcggagaaactggaactagtcaaaagccaaaacatgaatatgtggtcacttatctacctaataagaaaaatgcaagaagacagaaagccgaaataaaatttattgatgttgataataacaaccaagaattagctacttctggagaactaaaaggaaagcctggaaaagaaatttcttataatacggcggatgttttgaaggatttaaccgctaagggatatgaagttgttactaatgattttgatgctgaagagcagaagcctgtttttggaaatagtaaagattatgttcaaatcttttttgtggctttaaaacacaaaaaacaagttgttagctccgaacatccattttcaggaattgatgcaaatctttatgaaaaagaagttcatcggacaattagtttctcaggaatagatgataggaagctagatgatgtagttcaaacagccatcttgaaacgcagcttaacaattgatctagtaactaaaaaagttatttcaggcgaatatacaagccaatggcagagtagtgaaacttatccttcagtacctgtgcctgtagtgtcaggatatcatactcaaattagtgaagtagtagcttcaccggtagaaaaacatgatttaactgaagaagttaagtaccacaaaaatggatacttgattcctgtggatgtaaatcataatgagttttcgaaaataaataaaaagcaattaattactaattcgattgatccaactaaagtggttcttccagaattagatttagaaaatattgtcttaaaacaaatcaaagaagtaaaaattgaagatccaagtcataattatcaagttccatatttactagtgcataaatatattgcagtcgatgaaaagcatccgcacgaggtaatcaatccagcgtactaccgtcgaattgtcactgctcgtgttcattatcaaggagcgggtaaacagactcctccagatgcagaacaaacggtgcgttggacaagaacaattacttatgatgaagtaagtaaagaacttattgaaaatggaatgtatacgacaaaatgggtagctgatagagatatttttgaagcaactcctacgcctgtaattaaaggatttgctgcaaatattggtttaataggtgaacacccagttacagaaactgacttaatggcgaccattacttatactccacttggaaaaatgattcctgttgatgagcatggaaatgaaatcaaaaatgctatgcatccaacttatgttaatgatccatatgatcccgtacgtgtgctttttactgaagaagtaccggaagtgccgggatatgcaccagttcacgatacaatttctgttaatgatccttttacagatattaaagtgtcgtatactttaaagcctcgctatattccggtaaatagtgaccatccttatcgaccgattaagcctacattgtacagcgtgcccgtcaaggaaacaattaaatatcaaggtgctggtgaccaaacaccagttactcgtttgcaagctgcatgctggacgcgcactctgactgtagatgaaaatactggtgaactagtcgaagacggaaaatacacaactgcttggtcaattgataaaaagatctatacggcagtaccaacgccaattattgatggctatcatgctgataaaaagataattgaagaaaaagaagtaaaaaaagctgatgtcgatttgcaagtgacgtataagcaaaatgggagaattattccagtaaattctaaaggaaatcctataaagaatgttgtccaaccactatatgtaaccgaggcggatgatgcaactaaagtaaaaaggatacaaggagtacctagaattatgaattatattcctgaaaaagaacttattactatagaggatcctgaaaagaatacgcgggttatatattatacattcagtgaaatacgggaattaagcgaaaagaagctaaataaagaaaagcaagcaaacttaaaaaatgatagtttagagaaaagagaagagaagaagaaagttgaaaaaatagaagaaagaaattttaaaaaagatgaaaagaaaataagtaaaagagagacaggcataaaagatatgttttcttggtttaagtagttatataacaaactaggcttataattcggttagatgagtctagttaaaacaataaattaatttaaaaaaccaaatgatgttaaagaataatttttttctttgatattgtttggtttttgttttgcatttgaaagctcttgacaaaataaaaaatgggggggggggtaaactaggcttgtatctactagttaggttgaaacaagttatttaatttagttaaaaaatggaagaggaggttgttaaggtatcaacttcgactttatagaaggtattagtagtaacatataaccctttgctaagcagcttgttaagtaacgacaaaaaaattaaaaaaaacaatctcaaagactataaaataacaaaattcatttttaatgattttagtgtataaaataatatacaaatttttgaatattatcatataataaacacattattttatatataaaaacaatgaaatacagtaaaaatcagcaattaagcaagaaaaatactgattaaataacttctagacctattcttgtaatgaaaaatatttgttataataacactaaagatccgatagtattactaaaatatattaattatataacagttaaatggaggaaaataaggaatgctatctaagaataactaccaagaacgcttaagaaaaatggatgacaaacaagaacgtttttcaatccgtaaattttctgtcggtgcagcttctgttttagtcggaacagctgtattaactatgcaaaatgttcaaacagcacgcgccgatactacttcaaatactacaactaagacaacagatttatcttcagaagctgaagaacaaaacaagcaaaatgcttatgataaaactcttaatgaggcacaacctacaactaagcctgcagatgctcctgtggagagtcaagatagtaaggtggcctcttttagtgtgcctaaaaatgaaggaacatttgtagaaaaaacactaacgcctaatattactgaagagacagaggcaatgcaggataaggctgagttagctcaagtaaatagtgaggataagtcagctgaaaacaataaaactaatgtaaaggaagaaagtcagactgttgaagagaatcaaatggataagcgatcagctgaagcgaatatatcggatacagaaaacacattagtaagtaacacaactttaaatgtccctaagacaactccagctactacacgcttttcagcaacagcactaagtgagagcaaatttcaagtcaatgctccacgcgtgggccaagatactcctgatacacaagttaagaaaaataattataaacttgtaaccaatgctactgcacttcaacaagcaattaatactggtgttgcaggtgttaatattgatagaagtattgatgcttctaatgttgatttggctattagaaatacttttacaattgttggtcttaacgatgcagcagcacttaatttaggtcaaaaatctcttaataattccggtaatttaactctccaagatattaagattaatggatcaatctctggtagcggtacggtaaatattaagggaaatgttacttctaatgtaaatagtactaattcttctgttccaactcaggatcaatataatgctcaaaattatactggtagtagaactaactttaagaactctaacattgctgctaggaacgtaaatattgaaaatggtgcttccttaactattaacagttctgaaattaatgatggaattaacttagctgatggcggtactgttaaagttggcgataatgctactttaaatgttaacctgactaatacatcaactactgctacccgttaccatgttgctggtgtgtttgccaagaatggtggtaactttattagtggttacaagtcaaatgttaattttaatacaggattaggccaagctattgcgatcggagcaacccgaccaacaagtactgacgccgatagatacggtggttatggtacacgctcaagaaatgatggtccaacattagttcaattaggtgactcatcgacttttaactttactggacgtgacggtattatcttaggtaataatgctaactttatttctggagagaattcaaatgttcattttgaaaacaagggacgaggagttgctttagatttagctaataactcaaatatcgaaatttctaaacattccattacttctttccattctgttggcaagacaggaacgtctggtagctttgatggctataactatattggtgttaacgaaggtggtaatattactgttgacgaatatgctaccttccgtgtaattcttgaaggtcgtggcgataatccatgggatgacgtaatttccttagattctagaaatgctaacacaaatgctgctttcacttctaagacaggagcaattgttgacattcgtgatgataatactaacttttacgcagaacttatttcattcccactagggagtgcaaactcacgcattgatattcaagatcccctaatgcttaacctgcaacgctactctaatggtggagcaacgactggttggatggctactggtggtgacaaaatcaacacaacttcggcacaatatactgctaacttaatttatatgagtggtaataagggagtatttagtgttagtggtggggattacgatccatctaatcctaatagttccggctttgttgtttaccaacaaattaagtcagatggctcaaaacaaatctggctcaatgtaaatagcgttgatattccaatgaatggattccaaactaaagatatttggaataatcaagcaaacccagacgtatcaattgcaggtaatggtttaactgcaggtattaaagcgaaccaagttcataactttgatgggtctccactaactggtccgaatgcaccatactatggaatttcaacccaacgtgctagtcatcaaatttggattcctcatagaacatcattggaagttactggtgaacacaagagtactattaagtacgttgatgaaaatggaaaagaaatttttccagaaaatactcaatcattagatatgaaacgtagtctgatacttgatattacacaagataagattcaagatattcagaattatgctttaagtcatactgcagatgaaactttagagtacattaaaaacagtcaagcagtagttcaagattcaggttgggatttcactgatgctaatggtaaagctgttattgatccatatagtacaattgactcacctaaattggctggctatgctgcaacgatccaatcaacaaatgtttcaactttaaaggttggagcagatgcttctgcagtaactgctaaatttatggttgaaccatctcaagatatggttcaaaatggcgaattatcaactgcttacaagcaaaatggcactactggaattcctgcagattatgtaacagtagtcgtttataataaacaagcaacttatcaggcaggtaaaactgatagtaagagtgttgttcgtgatattaactacttagatggtaagacaggcaaaaagattccagctaacctaattaaagataatccagtttctcaaactgttactatgcaccgtactgaaattcttgataattcaggcaaggtaataggttatgggactattagtgaagatggtaagtcgtacacacttaacaacgattggattattgatggtaactgggaagctgtaaaatcaccagacttaaccactaatggttacaagacaccacgttttgaaaatggtgatatagccaaagtagttccagcagaaactgtaaatgaaaatacccctgatactactgtaaatgtttactacgaccacaatgaaatcccagttggtccagatactccagataagcatggggtagatttaaacgaattaactaaagatgttaacgaaactgttcactacgtatacagtgatggaactaaggcagctcctgatgttgttcaaacttctaagtggactagaactttaactattgatgcagtaactaatgaagtaatttccgatggtcaatataccactgattgggcaattcctaagggtgaaaagactgtttacgatcaagtagatactccagtaatcaaaggctatcacgcagataagcgtcaaatcaatgctacagtggttactcaaaataatattgaagagactgttacttaccaaccaaatggtaagatcattccagttgatccaaatggagatccaattccaaatgtaccaaccccaacttacccaacagatccaacagacccaactaaggtagtaccggatgaaccagtaccagaaattccaggattgattccaagtgttccaacagtaacaccagaaaatccaggtaaggatacgccagtaccatataccccagaagttccagctaaggatcaagtagcagttgttaactacattgatgcagatgacaacaacgcaatcatcactagctcaggcaacttaactggtaaagctggcgaaaagattgactacagtactgcttcaacgattgaagaactagaaaacaagggttacgtacttgtaagtgatggcttcccagcaggagcaacgtttgataatgatgacaatacaactcaaatctacacagttgtattgaagcacggtacagttccagtaacaccagaaaacccaggcaaaccaggtgaaccaattaatcctaacgatccagatggtcctaagtggccagaaggcactggtgaaaatggtgtaaagagaacaggaactcaaactattcactacgaaggagcaggcgacaagactcctagtgatgatgtacaaacattcgacttcactaagaagatgctggtagataaggtaactggtaagatcattgatggaggcgaatggaatgtaactagtcacacatttggctacaaggatactccagtaattgaaggctaccacgcagataagcgtaatgccggaggatctgtggtaacaccagatgacttgaacaagactatcacagtaagttaccaaccaaatggtaagatcattccagttgatccaaatggagatccaattccaaatgtaccaaccccaacttacccaacagatccaacagacccaactaaggtagtaccggatgaaccagtaccagaaattccaggattgattccaagtgttccaacagtaacaccagaaaatccaggtaaggatacgccagtaccatataccccagaagttccagctaaggatcaagtagcagttgttaactacattgatgcagatgacaacaacgcaatcatcactagctcagacaacttaactggtaaagctggcgaaaagattgactacagtactgcttcaacgattgaagaactagaaaacaagggttacgtacttgtaagtgatggcttcccagcaggagcaacgtttgataatgatgacaatacaactcaaatctacacagttgtattgaagcacggtacagttccagtaacaccagaaaacccaggcaaaccaggtgaaccaattaatcctaacgatccagatggtcctaagtggccagaaggcactggtgaaaatggtgtaaagagaacaggaactcaaactattcactacgaaggagcaggcgacaagactcctagtgatgatgtacaaacattcgacttcactaagaagatgctggtagataaggtaactggtaagatcattgatggaggcgaatggaatgtaactagtcacacatttggctacaaggatactccagtaattgaaggctaccacgcagataagcgtaatgccggaggatctgtggtaacaccagatgacttgaacaagactatcacagtaagttaccaaccaaatggtaagatcattccagttgatccaaatggagatccaattccaaatgtaccaaccccaacttacccaacagatccaacagacccaactaaggtagtaccggatgaaccagtaccagaaattccaggattgattccaagtgttccaacagtaacaccagaaaatccaggtaaggatacatcagtaccatataacccagttaaggatccagataaggtaactacagtagaaggtaaacaaattattcactttgtagatggcgataataacaagccacttaaggatccaaatattcaaacttatgaattcaagattactaatggtgtgccaaacgaatccagtcatacctttactctagttaatgtaccggtgattccaggatatgttgcagaaattaagtctgctggtggaaagacggtaactccagataagcctcttgcagaagtaacagttgtttaccataagatcggtaagatcgttccagttgatccaaatggaaatccaattccaaatgtaccaactccaagctacactaacgatccgacagatccaactaaggtagtaccaaatgaaccggtgccagctattcctggaaagacaccagataagacgacagtaactccagttgatccaactaaggatacacctgttgtttacaaggatgataaagtaccacctgctccaaatacacaaaaagctgtagttaactttattgatgttaatactggaaaaattatcagtacttctggtattttaagtggtcgcccaggagaagatattaataagttattctcgtctgctgaagtaattaagcaattagaggctgcaggttacgaagttgtttataatgcatttgacggcgatggtgtgactaagtactttgacaatgatggcaatacggtacaacaatttactattgctttgaaactgaaagaaaaagctaagacgccagatcccgttcttcctgatccagaagttcctgtagaaaaggaaactcgatctgaacaaccagttaagcaaaatgttgctgttcctactccagaaaaacctgtagaaaagaagactactgacaataaggaagtcttaccgcaaacaggtgctgatagtaatgaagcggctactattttaggtgccgtagcaacagcaattggcatgacaagcttgattggcgcaaagagacgcaagaaagatgataaataattttttaaattaaatatcttttttcaaaattagctagtaaaaaggcgttgagacttgattctcagcgcctttttttaatacattctatttataatagtggatccatataagaaaagacatacaatatataaagtaattcacgttaacaagggggcatgaaatatatggataatttaagtgagaaagttgcatcagtagctgtaaaatatacggatttagataataatctggctgaactttttacttctgaaaacttgacaggaaatattggcgataaaattaattacagcacagcagatgaaataaaaaatttaactaatcaaggatatgtattagttaatgatccctttgatagtaaaggaaaagaaccggtatttagtgaagatcaagacagttacatggttacctttaagcatgggagagagcaagttacagttgataatctaaaatatggctgcaagcttgaagatcttcaagtaaaaggtactcaaactgttcattatgttggcgcgggtagtcgaactcctagggatgaagtatcaacaattacttttaatcggattttagtctatgatcgtgtgactggcaaaaagattggtagtaagggctgggaaaaagttgagcagtcttttccagtagttgcggcaccaagtattttaggttatgttcccgatcaagttttagttggtggaaaaacagttactgctgatgaaccaaatcgtgaatacactattacctatcaagttaatgaacatatttcaaacaaagaacagaaggcagaagttaaatatcttgatattgatagcaataatgaagaaattgttgaatctaaaattttaactggggctccaaatacaaaaattgactatagtacaattgatcaattgaaagagttagacacaaagggctatgaagtagtaagtaatggctttgatgctaatggtgatattcaattctttgatacaagtgacgactatgttcaaacctttattgtcaccttaagacataagcaagtactggttaacgaagaaaatccacttgatggtattgatgagtcagaatatcacaagataagtaaacgagttatagcttatagtggtgctgatgatcagacaccagaagaagtggtacagcaagtaaactggagtagagatcttacagttgatgctgcaactaagcgaattatttctgatggaaaatacacaactgaatggaagccagagcaaaaaacatattcagcaatttctgtaccagcagtaagcggatatcatacttatataaaagaaatgcctgaggaaaaggtaagacttgctaacgtaactgaaaaaattagatatgtaaaaaatggctatgtcattcctattgatgagagcggacaaaagattgatattctacctaaattacgttttgtttcagataaaaatgatcccactctagtatctttgcctaaaaataatctaaaagatgagaaatacgagccagaatctgttgattttgcaaaaattgatccagcaaaagacatagaagttaagtatgttttaaggcataaatatgtggccgtaaataaagataattctcattttgatgttaatcctggtgcatatcgccggactgctacagctttagttcgttatgacggagctggtgttaagaatcctaatgatgcgatccaaacagttcaatggaatagagatatcacttatgatgaggtaacaaaagaaatcttagaagatggaaaatatactactgagtggaaagcagataaagagtactttgaagcagtagatacaccagtaatatccggttttacggctgatattggggttgttgctaagcatgatgtaacgcaaagcgatctttttgcgacagtaacttacaaaaagaatggtgcgattattcccgttgatgaagagggacaggaaatttctgaagctaaaccagttccatttcttaatgatttaactgacccaactagagtcttggcaacggaagaagtgcctgaaatagaaggatatcgccgtactcaagagactgttttaattaaagatccagtagcagatattaaagttaaatacattctaaagccacgttatgttcaagttaatagcgagcatccctatcgaacagttaagccgcatcattacagtattccggttaaagagacgattcattatgtcggagctagcgacaaaacaccagtagatcgaattcaaggcgcacgctggaatagatctttaactgtaaatgataataatggaaaggtgattaaggatggtaaatatactactgcttggactgttgataaaaaagaatatagcgcagttgtaacgccggtagttgacggatatcatgcagatcaatatcaagttaaagaacataaggtagagcgtgaaaatattgatgtggtagtaaaatatcaccaaaatggtcagattatcccagtaaactctaaaggtgaaaaaattaaccatgcagatcacccagtgtatataaccgacacaactgatgcaacgaaagttttaatggaacaaccggctccaagaatcttagactatatgcctaaaaattcatcagttgttgtcaaagatccaagtcgtgatacaaaggttatctattatacctttgatgaaataaaagaattagtctcagataaaaagttaaagactaagattgaatctgttgatggaaagtcaaccttgtcaaatgtagtctcacttccaggtgatgacaataagagaaaagcaatcgttacttttgttgatttaagtaacaatgcggttcaaattgcatcttctaatgttttaagcggaaatgtgggcgacaagataactgatttatacagtacagctaaacaaattaaagaacttgaacaggctggttacgaagtggtctacaatggctttgatccaaaaggcgcaactaaatactttgaaaaagaccaaaaaacagttgctacatttacagtagcagtagaaaaaactaaaaaagtagacgctaaagaagaaaataaagcggagataacttctaagaaggaagctacacaggcagatggacaaaatgagcaagatcataaagttttaaagcacatttttccatggatgaagtagaagataaaagagctagatttgattatgcaaatctagctttttttatttttaaagtttttagaccaattttgatgaagaagtgtataattaattttcgaaaaaactttttcggaggaaaaattgtgtctgataaaagcgagtctttgaccaaattagaagaagacgaaaagtataatcggttaacagcattgaagttattcgccatgacttcatcaatggttatctcagttaatgagttggctccatttggaaaaactggtccaacagcagttttttatttgctattagcaggcttaatatggtttgtaccaattacgcaaatggcaggagaaatggcttcagttgacggctgggataagggtggaatttttacttgggtaaaagggtccttaggagatcgagctggctggacggctatgttttatcaatggattcacattactgttgggatgaacacaatgatgtacgtaattattggtgcattatctattacctttgatactccttggtttaacactacaccaagtattagatttctattgatgatgataattatctggtcaattactcttgtcgaaatggtaggagttaagaaaataggacatattgcagagtggttatttggacttgggatagctttaccagtaattttgctaattattaccttctttgtatatctctttcaaggacgtcccctatatatgcatttaagctggaataatatctttccacatcatttaactggggctaccttagtagcttttgtgccatttgtgttggcattttgtggtggggaagcatctgctccgcatgcaaaatatttggaaaatcctaaaaagtattccactgttatgctcgctttagctgtgactgctatttcttttgacttacttggtagtaccgcaattggaatgacaattccgaaagatcaaattcaaaattcaactggttttgtctatgcctttggaaaaattttagattcaattggcttacccggggatgttattaagaagtttatcagtgtattactggcagctggtattattggagaacttggaaattggctcgctggtcctagtcaagggatgtttgaagctgctaaagaaggctatatgcctaagttcttcgctaaatctactgatcgtgacgtaccgatgcggttgattgttttacaaactttgattgtaactgcatctgcaattttaattactttcactagtggtaagaactctgattttgcttttaatgtttctttagctgctacgactgctcagtacttgatggtctacattttaatgttgatctcttacatcgttttaaaggtaaaacatggaaatctaaagcgcagttattatatgacaaggagcaacggcttaggggtaataattgcaattattgccctggtaataactgtagtagcattctttatttcctttatcccagcacaaggaacaccgactgaattaaagggcgtttatgtttggacaatgattggtctgtgccttatcgttacaattttgccactggtaatttatcattatcatcaccgatttaaacagactaaatataagcaaaaaaattaataaattaaacatttttacttgtaaaatataactaataatattacatttaaattgtattcaagttaatgtgtaaaggaaaagagctatggtaaatttgaggtatccatagctcttttgtttataatataaaaactatattaaggaaataaataatgaataacccagaagaaatacagcattttattgatgtattactcaaagaagatagttttgtgaaagcagcaaaaaagctctacatttctcaaccctatctcacccagttaataaaaagaatagaagaccgtttaggaacgccaattattgatcgggataaaaagccctatgcattgactcaagcaggcttactgtattatcaatatttagaaaatatttcttataacaaacaacaattaaataaaaaattagcccaatatacacaacctaataaagaaatcatcagaattggaattttagagagtctaggcacttatttactaccagaaatactgccagattttttaaagaaaaatcctcgagtagaaatgcagctttttgaaaacttcccaagagaaagtgaaagaaatttactgagtggaaatattgactgttatatcggtcaaaccccagaagcaattgattcaagcttagatattgtaagtaatggtggtgaaagatactatgtagtaatttcaccttcatctccgtattaccaggaaggaaaatttatccttaaaccagatgacttaaacctaaaagacttattacaagaaccttttgttttaagtgttcctggttcggctattcggcaccaagttaatggagttttccagcgatttcatttagaaccacgagttgttttagaatctaaaaacattattactgcaactagtctagcaattcatgggatgggattaactatctccactgctagtatcattaaaagaattggtgaaacgccaattaacctttttcccttaagctatgacttaattaacgttactttctttattgcaacaaaagctgaaaaaacaaaatcgcaagctttaaaaaatttagttgaagaatttaaaaagaaaaatttacagcccattattggataaggtaaatgagacttcacactatgtcagctataacaaatttgttattagtaatttgtaaaaaagatatttaagcctgtagatttaataacttataatttaggtgaaaatatttaagaaagggtagaaaaattatgaaatcaggaaaatacaacgtaaaagctcaaggacatggtgcgagtttcatgcctatggaagttactctttccgaaaataagattgaagatattaaggttgacgctaaaggtgaaactaagggagtagctgacgaagtatttagacgtttgcctgaagaaattgttgaaaatcagactttaaatgttgatacagttagtggtgctactatctctagtcatggtgttattgatggagtagcattggcaattagtgaagctggcggagatccagatgagtggaaaaaccgagctaaaccaaaggaacaaagagctaaagatgagacttatacaactgatgttgtagttgttggagctggtggtgcaggtttagctgccgctgctagaagtattcaacatgataaagatgtcattgtacttgaaaagttcccacaaattggaggaaacactagtcgtgctggtggcccaatgaatgctgcagaaccagattggcaaaataaatttaaagctttagccggtgaaaaagaaaccttagaagaactagcagcaactccacttgaagagattgatccagagtatcaagaagactttaaaaaattacaaaagcaaataaaagaatatgtagcttctggtgcggattatctatttgattcaaaattacttcatgaaattcaaacctatttaggtggtaagagaaccgacttaaatggaaatgaaattcatggtaactatgctttagtcaaagaattaatcgataatgccttggactcagtgcattggttaagtgacttaggagtaaaattcgatcgcagtcaagtaacaatgccagtaggtgccttatggagaagagggcacaagccagttgaaccaatgggttatgcctttattcatgttttaggtgattgggtaaaggatcatggtggaagaattctggccgatactcgagctgagcacttgattattgaagatggtcaagttaaaggcgttattgctaaaagaccagatggcagtacaatcactgttcatgctaaggctgtaattttaactgctggtggatttggggcaaatacaccaatggttcaaaaatacaatacttactggaagcatattgatgataatattgctactactaattctcctgcaattactggggacggaattaatcttggtaaagaagcaggtgcagacttagttggaatgggctttattcagatgatgccagtttctgatccaaagactggtgagctatttactggtctacaaactccaccagaaaactatattatggttaatcaaaagggaaaacgtttcgtaaatgaatttgcagaacgtgatgtcttaaccaaggcggctattgataatggcggcttgttctatttaattgctgatgacaagattaaagatacggcttataacacaactcaagaatcaattgatgcacaggttaaagctggtaccttgtttagagctgatagcttagaagatttagctaagcaagttggaatggatcctgctactttagttgagaccattgagaaatataattcttatgttgaagcaggaaaagatccagattttgaaaaatcagcctttaatctaaaatgcgaagttgctccattttatgcaacaccgagaaagccagccatccaccatactatgggtggcttgaagattgatacaggtgctcatgtcttagataaagatggtaagcaaattcctggtctatatgctgctggagaagtagccggcggaattcacgcaggtaaccgtttaggtggaaattcgcttgctgatatctttacttttggtagaattgccgcaaatagcgcaaatgatgaattagaaaaatagtattaatccattaaaacgttgtaaatactagagtttacagcgtttttttgctaaaatactaaaaataattgattttttggaggaatataattgaaagaagcgcaggaaaagaagctgacgacaaaacaatatttaattgtagcatcaatgatttttgcactattctttggtgcaggaaacttaattttcccacttcatttaggccagcttgctggtaaaaattggggaccagcagcaattggtttttcaattactggggtagttttacccctactttcactcctagcggttgctattactcgtagtaatggtgtttatcaaataggtttaccggtaggaaaagtcttcgctcttttgtttatgactttgatccagttaaccatgggccccttatttgcggcaccaagaaatgcgaccgttgcatatacggtaggggtagccccacttcttcctaagcaatttcaaggcggcggattaattatttttaccgctatcttttttgcaattgtttttgttattgcatataacgaaagtgacatcctatcttctttaggtaaaattttaaatcctatttttctagttttactatttctagtttttgttattgcctttgcccgtccgttaggtaatttaggaactgttcccgttagtaaagattatgctcaaggaacaatagtaaaaggatttttagaaggatataacacgatggacgctttagctggtcttgcttttggcgtaaccgtggtaacagctattaaagaattaattggtaacaatgaaagtgaaacagcaaaaattacagcaaagtctggtttaatagccgttattgctatcggagtaatttatactttgttgattatggtcggagcaatgtcattaggacattttggaataactagtgatggcggagttctgttatcccatatcgttagatactatgctggtatctttggtcaggctttattggctgttttagtatttttagcttgtttaacgacagcagttggggttttagctgcttttgcactagatttttccgctcattatacaaaatttagttataagggatggttaaccatcgcttgtatcggatcatttgcaactgcaaatttaggactcgataaaattattcactggtcgcttcctgtcttaatgttcttatatcctttagcaattgttttgattatcttgtctttattctcaccatttttcaaaaaagatagagtaatctatcgcataacaatggcattaactttaataccagcagtctttgatttaattacaaacttgccagcaccaattgctggaacgccattctacaatgcagttagtcgtattcgacttcagtatttgccatttgctaatgttggtctagcctgggttgtaccgactatcttagggttagttattggaattttagttcacatttggcgtcgtaaatctaatcgaatttaagaaaagctatggttcatttgaatcatagcttttttgttgggataataaatttggtgataaaaatgagtttaactaataaggtacctgaaaaagacgttcatgatttatttacacgagttgctccgcattatgatcagatgaataatctgattagcttaggaacacaaaatggttggcggaaaaagttctttaaaaaattaaaagtaaaagctggagattttgctttagacctatgttgcgggactggtgacttaacaattgccttagcaaaacaagtgggtccctctggcaatgtaattggactagattttaatcaaaaaatgctcgacttagctgataaaaagattagggggcaaaatttacaaaaagaaattcagttaaagcaaggggatgcaatgcatttgccttatacggaccaaagctttgatattgtaacaattggttttggtttacgtaatgttcctgatgcagatcaagttttgaaagaaatttaccgggttttaaagccagatggaaaagttggaattctagagacttcacagccaactaatccaattattaagttagggtgggagagttacttcaaactatttcctaattttgctaaattattgggtgctaatgttgacgattataagtacttatcacatacgacggctaaatttatttcagctacgcgtttaaaggaaatgcttgagcaagatggttttaaaaatgtaataataaccaaattaaatttaggtgctggtgcaattcatatcggaattaaaaagaaaatgagataaaatataaaataaaaactaaaaaggagaattttatgagaactggtactaaaattattactttagacaacggttatcacttgtggactaatactcaaggcgaaggtgatattcatctattagcacttcacggtggtcctggtggaaatcatgaatattgggaagatgctgcagaacagttaaagaaacagggacttaatgttcaagtaactatgtatgatcaactagggtcactttattctgatcaaccagattactcagatccagaaattgctaagaagtatttaacttatgaatacttcttagatgaagttgatgaagtgcgtgaaaagcttggcttagataatttctacttaattggccaaagctggggcggcctcttagtgcaagaatatgcggttaaatatggtcagcatttaaagggcgccattatttcttcaatggttgatgaaattgatgagtatgttgattctgtaaatagaagaagacaagaagttcttcctcaaacagaaattgatttcatgcatgaatgcgaaaagaataatgactatgataatcaacgctaccaagatgatgtacaaattttaaatattaattttgttgatagaaagcaaccttcaaagctttatcacttaaaagatcttggtggaagtgctgtttacaatgtctttcaaggtgataatgaatttgttattactggtaagcttaaagattggcactttagagaccaacttaagaatattaaagtaccaactttaattacttttggtgaaaatgaaactatgccaatttctactgctaaaattatgcaaaaagaaattccaaattcacgcctagttactactcctgatgggggtcaccaccacatggttgataatccagatgtttactacaaacacttggctgactttattcgtgaagttgaagatggtaggtttaaaggtgaatagaaaagtcgatgctgagcatcggcttttttatttactaggcaaataaatcgctttcattgaaataatactatataatttaaagcaaatatagttttgttttattttattcaaggagaaaatgatgagcaaaaataataaaattacccgattattagctgctacagctgtaattggcattatcggaacttcagctgctgcgtgcagtaataacgattcatcaaatcaaagtaaacaatctagtgtaaaaaaggaaactaaagataagaaaagtaatacagaaaatgcactaaaaaagagtcaaatcaagcttagccaaactgaagctttgaacaaatttgatgaaaaatacagtgataaagagattaaagaaataaacctaaagttagacggtaaccgatacgtttatgagatcgatggatttgataagagtaaagaatacgaaatgacaatcaatgctagaactggtaaggaaattaaatctagttctgaaaagcttgatctagatgaacacctacaaaaaggtttagatttagataaaacaatttcgcgtaaagaagctagtgaaatagcagaaaaagaagtaaaaaatagtgttgccaaggaatgggacttaaaaatggaagatggtaaggctatttgggaggtaacagtagagtccggtagcacaaaacatgaagttgaaattgatgctagctctaaaaaagtaattaggtcagaagaagaaaattaattaataaaaaggatatcgagcggttgacggtattgcgatatcaggctataataatagtcctttctaaaattaaacacttgtatacgacaaaagccacctgtttcaggtggctttttttgttgggaatataggatataaatttaaagaaactagtaagtcacaagactggttgaattcatcgtgtgatcatctagtttataggtctttaattcaaaatcatcttcaaaattacagtagtaagtcttgcttccagaagagtagcatgcagtataaacagtatattcgtccttgccttgatcgttgactacactgcctttgatcatggcaacagactttaagatgttaaagaatttagcgacgtttgctttttcacctttagcagttggatagtttacgtttaagtaagcagctttaacaaaacgatcggctggaatactgtcaccgggcagacctaagctaccagttcctacgccccaaggagcaactttttgcccgttccagctttgggctgtagcgtcatgtgggtttaaaccggtgtagttaccaaggttagtaaggtgccagttaaagtcagggctattagttaaaacgccaactttgtcatcaaagactttcattccatattgttttgaaacctcaacaataatggcttcgtcactatcactaatgatccagtgaagaggggcaaccgcaaatgatgtgttaatagcttcattcactaagttaacattctttaaagcttcctttacttcactaacatgagtaaagttttgagtaacccagagcataatttcgtaagaagctaagttgattttaccgtcaataggaccatcactaaatttagcaaaatgtgggaagtttaaacctgcaatacctaatccatcttcgttatagcagtcaaagtatgatggatagccatcaaccacaattcccattccaataacagcctttttagtagtggtgttatctaagaacttatatggaagaggataattacgcggcgtaataataacgccttcgccataatcctgtccaacatctagattacggccaaagtataaatttccttgatcatctgtgaatcttaaaccagtacacatttccaaaaaacctccttatttagcattagcttttgctgcttgctctgcaatatatttcttttgatatctcttaatttggataacggcaaatactaaaataataaaaccaattgcaacaaaggcaatcataaagtaccaagcgactgtaaagcttgcagctcctttaataatcccaaagagtggagcaccaatggcatagccgattgcataagctaaaccaacgtatccaagcatgacaccttgatctcttgaaccaaagaggtcttttgccatgaaggctgggcctgacatgtaactaaatacagctaagccgcaaaagatagcatagccaataccagcagctttactaatagatgaaccatatggctggaagctaataaagatcatcattagaatagataaaatatacatacaaccagcataggccattgattttgctgtaccaaatttgtcaaataagaaaccaccagaaatatttccgattaaacaaccaacaccgtacattgatccaactaaaccaacatccgttaaagaaagtttagtatcaaggaaggcggcatagtcttcatttaaggaagctaagcctaaaccaatgattaagaagccaaggctgaaaatccagaaccatttcatttgtaacacttgtttactagtccagcctttaaactctttagctttggctaaagcctcttctttcttgctttcagctagttcttcatcagaaacgacaatttcgtctttcttaggggttctaatgaagcaggcgataattacaccaattactaataaagcgacggcaaagataaagaatggtgccatagaggttaaatgaccggtcttagtattacctgtcatgtagtgctttaaaattgcttgagttgctggctgtaaaaagatattaccaatcgaaccaccgcagaaggcaattcctaaggcagccccacgtccctttgctgggaaccagtggttaataacccatggaacaccttggccggagtaaaaggttgaaccaaccatacaaatgatagcggcaatatagaagccaggtagctttgtactaattccaaaaattacgtaggcaatagcagaaagaccaataccaattaaatacattagtcggaagttaactttttctaacgccttaccaataaatggagaagcaactgaagcaaaaaccgcaccaaacgtaaaaattaatgtgtacgatgctaaggtaaagtggaaggtattaactaaagggtgaataaacaaaggctgaatattttgagcaattccataaggaatagcttgggttaacatacataggaaaaccatgaagtacttatagcccttgcttactactttatctttagtagcggcatcaggagacatgtaattaccctctttctaactaattacttatctaaaataatatttggcttgttcacgccaatatttttttgaatttgtttaattttaatagctgcaaaaattaataatataaaaccaattgcaacaaagaaaatggtacaccaccaagcaacggtaaagctagtggcacctttgatgacgccaaagagtggggcaccaatagcaaaaccaattgcataggctaaactaatgtaacctaagttaaccccttgtgctttggcaccaaataaactcttggccataaaagcaggtccagacatgtaactaaagaccgatagcccgctagtaaaggcccagcccatgccagcgtataagttaatacgatctccatagggatgtgtactgattaggatcatcatcaaaatagcgataatcaacatgattcctgcataagccatggatttagcggtgccaaacttatcaaataagtaaccgccggaaatattgccgataataccagcaatcccgaatactgaaccaatcatgccgacttccgttaaggataatttggtatctaaaaaggcagcatagtcttcatttaaagaagccagccctaagccaataattaaaaaaccaatactaaagatccagaaccacttcatatgaagaacttctttaccactccaaccttgaaattcatgtgcttttttttgagcagcttcatgccgattctttttaacttcttcggctgaggcgagaacctcatctttcttaggaactctaataaaagcggcaataattagaccaacaactaaaagagcaacggcaaaaatgaagaatggagccatggaagttaaatgaccagtcttggtattaccagtcataaagtgtttcaaaattgcctgggtaataggctgtaagaaaatatctccaattgatcccccacaaaaggctaatccaagagcaacaccgcggcccttaaatggaaaccagtgattgataatccaaggaacaccttgaccagaataaaaggttgaaccgaccatacaaataattccggctaaatagaaaccaggtagtttcgtactaattccaaaaattacatatgctcctgctgaaaggcaaataccgatcaaatacaaaattttaaaattaactttctgtaaagctttaccaaccattggtgaaactagagaccctacgacagccccaaaagtaaaaattaaggtataagaagccaatgtaaagtgaaaagtattaaccagaggatgaacaaataaaggttggattaattgagcaattccgtaagggatagcttgagttaacatacagagaaataccataaagtatttgtagcctttactgaccaccttgtgcccatcgcttggcagatcgtttgacatcgtatctctcttctttctgataaaatactattaactttataagttatatattattaaacacgtgagctttgactatagccacttatattgtcgtctacttaagtaagtaaatcaaaaataatgacttattatgttatttaatgaatgtaataaaaacccgtctaactttcctagaataaaatgaattacaaaaggaaaaagattgattatctttgctattaagcatcgatatatcaatcttttttagttcgaacagatagacttagcggtaggtagaaatttttacattaggaaagaattattaatcttttacataacccgcaatgtcatcgtagtcaaaatcatagtttaatttcttaccgtaggctttttcataagcccttttcttttgcatataatcaatgtcccgcattcttttagcgttttgatcaactgtaaggcgatcaactgggtagattgtcggtaagacgtgaagaatatagcgtgtcttgtggaattctctactatttttttccatttctggaagatcttgaatttctacaaagcaggagataatcggtaccttagccttagctgcgtagtaataagcacctttttgaagggggcgaggtttacggtagtcataccacatttcttgttcagggtagattaagacccatccctttttatcaaagactttctgcaagtgctttggaaattctcgccccaagtattggtagctttgaacaattggaatagcattaatgttattcattaaaaagccgaagaaacctggcaattttaggttggagtcttcaattacaacatagagctttttatggcagcgattagctaattttttaattggcaggctatcagtttgcttaaagtgattagtcgttacaattgcaccatgttgcggtcctttagctctttgtttgtctttgatttgggtatgagccattaagactaaagtatcaagattgataatagtttgggcgataatatttttaaatttatggctcagctttttttgttgtttccaataatcgttaactagtttgattctttcatctttagtaagaatcggatcgcccaattcaactttagcgtgcattttaccttttttaacggctgctttgatattttcgataacttgtgcacgattttcgccgataatcatagtttaatcctttcgcctttagcttttacgtgagcccaattattgggatcaacgacggtgctatcttctttttcaagcatatgatctaacttagctcgatcttcggtacgttcctcatcagtataattatctaattcagcatgtaattcttcatagaagggtgtttctttagcgtacttccagaagtaatcttgatattgaacattatcaaagtgccatggcttaaagaataagttatagtgaattaaacctggattaggaaggggttctgtattttcattaggcattgcatcccagcgaggatcaagatgcaagattcggccatcgccaatttcattcaaatagtcttgatctggagcaatacagtcaaaatgatacttctcaagcaagtccataaaatgaggaataaagccttcatctctaaaggccttagaatttaagacgagcattccagagttaatatactttttaggatcaaggtctaggacatctttgatatatttcaccattttatctacatattgaatagaagaatcagtacatgcgccaaataaattattgcctaattctgtattgtatagcttagcaatgtcatcagtgactactgtatcgctgtcgatgtagattgccttatcgtattgcgggaaaagatcaggaatgaagaggcggtaaaagatagacatggtgaaaaagtcagctcgaagataattttcttttctatcttggatcggctttactaatttctcatcaatgtggaagaattcaacgtgtacatggtcattacccaaagctgccaattgatcttggtgttctttagatagatcttggtttagaaagataactgtgtagtcattttctggattagaattcttaactaatgaatttaaagatactgcagcgtatttagtaaagtcatcgctaatactataaaaaactggaatagtcattttagtgcctctttatatttttacggacgtagtctttttaacttttgcccaagttacatcttcatttttaatttcatcgacttttttaatcatccaatcaagatcagcgcgggcttttttacgatcttcatcagtaaagctgtccaattgttcttttagctcatcatagtatggggattttttagcaacatcccagaaatattgaccatattgaacatctgcaaagtgccatggcttaaagaaaaggttgtagtgaacgatttttggatctttgatttcatccatatgttcattaggcattgcatcccactcaagcggtaagtgatagatcttatcttcacaaatttcattcatataagcttggtccggatcaatattgtcaaaatgatatttttcaattaatgaatagaatttatcaacgaattttttatctctaaattctttcatattgaataaaatcacaccattattgatgtatttttctggtgggaagatgccttggcattccttaatataaacttgtagcggtttaataaatctaattgacatatcagggacactcgcaaacatgttatcgccaatttcagtattgtagagttcagcaatatcagtgcagataattgtgtcggcatctaagtaaacggccttatcatattgcgggaaaagattagggataaagagacggtagaaaatagacatggtaaagaattgtgctcgtaaataattttcttcactattgtgaattggagctaccatttcatcatcgatatggaaaatattaacatgaacattttcagttgaaagatcttcgagactctttttatgttcatcactaatactttggactaaaagagtgattgtatagtccttctttggatcaacatgatcaattaaagactgaatcgaaacagctgcgtaaggtgtgtaattatcactaattgtgtaaaaaactggaatagtcattctcaaactccatctatataataatttagcgctgctttaaaagcggcttaagttctgtgtactgcttaagtaaatcatcatattcatgtaatttcaagacgctatgaacacgttctacatcccaaggtttaactgttaaagtgtggaagtagggtttaaagcgaaagctagtagtaaaatgttggatttttgtatcagaatggagccggtactgttcgttgtagcagcgaggagcaattcttttttcggtcgcaagtttatttaaggcagattggtcgggaaggagcatttttttatcgctcattttttctcgaacttttgcaaataatcttgtctttttaatttcattcatatttaaaagcaaaactccggagttaaggtagtcaaaagttttgtggctgtgaagattatggaagaaaaagcgaccccagaaatctaaaacaccaactaattccacattagttaagtcttggttataaaaatcactaatatccttacgtacaataatatcgtcatctaagtataagatgcggtcaggaatttgtggaatttgatccgcaaataacctaagcatggcataaggagtgaaacgagtctccatgttagcgcgtggaggctcttttttgaacaagtcagtacagtcgattaattcagcagtgttgtttggatctttttctttaatgatttttttgattaagttaaaagcttgctcatcaaaagcttcatatccttctgcctgcatagttaagatatagaggtgcaggggagcggaggtattttttaataaagatagagttgcaattaaaataccatcttcggcgtgagagtcgccgcaaaacataatattcattttagtctccaatttctcgtttttgatagtgataatattgatagtcgctattcttagatcgcttttttaattgctcgaatacttgatcatggagctttttttgttgctcttttttggtcaaggtagagtccgggaagaagggaccatcaatataaacagtaattttgggatgcttgccaaatttgcgtttttgataagttgtcgtcattacaaaacttgccttatttgcctgaactggaaaattaaagctagtttctggaaaggaccgaatgctggtatagtaaggccagacatgagcttctggatagattacaatatgagcattttctttagttaaggttttaacagctttaagtaatttaatagcttgtttaatatttttgccgactggtagacctccatagggcaggagcgttttcccaataactggaattccccaatttgcttgattagcaatggcatagtaatttttccagccaaataaggttaggggcatgaagacgtcattaaccatttgggtatggtttccgtaaataaaatatccttcatctttatatttagataacttatccctacctagtactttgacatgcattaggccataagtaaaaagataagcaaaccctgtagccaaaaaacgcatcagataattaagcggagtatgtttaattatttggtaattatcaggcagggtaaagtcttgccttttactttcaacaacgtcatcggttgtggaattatagtagatagtatgatgtttagatggtttagtattcatgatattaattatagaaaaaatttagaaacaaaaaaagacatcgcaattgcgatgtcttttcaaaaatatgggtggtcaggggatcgaaccctggacccacggattaagagtccgttgctctgccagctgagctaaccacccattggataaccaacagatactattatgccaaaaaaaaataaaaatgcaagaactttttttaagaaaattgatataaattaaattggctgtataatttttcctgttgatgaatatctatgatattctatcgacaggatttttttacgtaaaaaaagaggccatagtcctctcttacttaaaatccttcttcgaccaattcaattaagtgtatggagatttaaactatgtcctctttaaatgattatattaaatttactcttgatattgaagataaaaacattattttttctgattattcaaatgaaaatattaacggtaagatttacaaaatatatttagctgagctgatccagcctacttgtccttattgtcgttctactaatcttaagcataacggtcattacgtctctaacgttcgtttcattactgctgatgctagtaagcccgttactatcagattaagaaaacaacgtgttctctgcaatgactgtttaaaaagatctatggctcaatctaatctggttaataaaggctgctatatctctaacacttctaagcgaaaaatactttctgctcttactgaagatcgttcaatgaccagcattgctagagaacataatgtatctgtcaacacggttcaaagagtattagaagtctgctcttctaagttctatgatgcctttgatcatctccctgaacacttagcttttgatgaatttaagggcgtaggcaaaaagcttcactttatttgtctagatggtgatactcacaaagttgttcaaattcttagaactcgtttcaaacctgatattctacgctatttttacaagttcactcctaaagctcgtgcaatggttaaaacagtaactatggatcttaattgttattatcctttagttgctagagaattatttccaaatgctcagatagttattgaccgttttcatatggttcaaatgcttactagatcgtttaatattttcagagttcaaatcatgaagcaatttaataaaagaagccgtgaatataagcttttaaagtccccttggaagctttatctcatgaaatatgacaaacttaataagactactccttattacgactggcattttaaggactgtctaacacaggaacatgttgtcttagatggtttagattgtgaccaaaccttagaaaatacttattgggttatgcaggactttatgactgctattcaggataacgatgaaaagaaagttatccatctacttcattcaaaacaaaatgttggtaaacaaatgcatcaaactctattaacttttaaacgtaattattctggtgtcctaaacggtattacctcaacttattctaatggttgtcttgaaggagttaaccgtaagattaaacaaattgaacgtactgcttatggttatagaaatttcaaacatttattaattagaattagactcgaagaaaatattataaaagaaaaggaatcaaacagctatttcttagctgcttaattccttcttaaaattatccatcaacaggatttgcaaaagagccattaaattgaagaaaattagaaacaaaaaaagacatcgcaaatgcgatgcctttcaaaaatatgggtggtcaggggatcgaaccctggacccacggattaagagtccgttgctctgccagctgagctaaccacccattggataaccaacaaatagtattatgccagtaaagtaaagaaagtgcaagcttttttttgcataagtttaaaaaaagtggggaaaacagtataatatagttattaatactgaggaggcatcatttatgccaaagaagattttagtcgttgacgatgaaaaaccaatttctgacattattaaatttaatctgactaaggaaggctttgatgtcgacactgcatacgacggcgaagaagctgttaaaaaagttgaggaatataatcccgatttaatgattcttgacttgatgttaccaaaaaaagacggcttagaggttgcacgtgaagtgcgccaaactcatgatatgccaattattatggtaacggctaaagacactgagattgataaggtgttaggtcttgaaatgggagcagatgattatgttactaagcctttttctaaccgagaattagttgctagagtaaaggcaaacttgcgtagacgtgacttgactcaaaaagctactgaagatgatgaagacaaaaatattaccattggcaatcttgtgattatgcctgaagcttatatggttgaaaaaaatggtgaaaaaattgaattaacgcatcgtgaatttgaattacttcattatttagcacagcatatgggacaagtaatgactagagagcatttattacaaaccgtttggggctatgattattttggagatgttagaactgtggatgtaactgtgcgacgcttacgggaaaagatcgaagacaatccaagttcaccaacgattttagttaccagacgtggagtaggatattacgttaaaaacccatcagatgaataaggatcaaagtcactagtgatagtggctttttttgcaattaggaccaatgaagaaaataaaaagtgtactaaattctattaattttaaaatcgcaatcatttttatgttgctactactagcaacgattgaagtcgttggagcttcttttactagacaacttgaacaaaactcaattcaaaattttgagtcttcaattcaagtcccaaacattattactaaccaaattgccagtcaattgagtagggcaaacagtaagagtgctaatcagcagctaagccagattatttcaaactataatctcggcgatattagtcaattaatggtagtagataataagggcgtgatccgagctgtttcaaatgttaatgatcagaatcgaattggccagcggactagtaatgcggatataaaaagcgtgctttcaaatggaaaacaagtttctaaggtaatcaatgacaatggaaactatatggtgcaaatttcaccattaacatctgctaatggaactaatacgcctgtgggagctatttatgtaagagcaagtttacagggtgtattcaataatttacggcaagtttctatttactttttgattgcctcattaattgcggctgttttaggtgcagtagttgccttggtaatttcccgggccataactcggccgattgaagaaatgcgtaagcaagctttgcgggtcgcaaatggagattattcgggacacgtccgggtttatgcgcaagatgagttagggcaattagctgaagcatttaacactttgtcggtacgaattgagagaactcaagagatttctgatagtgagcgaagacggttagataatgttttgacccatatgacagatggggttattgcgactgatcgtcacggaaatattactatcattaatgaaactgccttagactttttaggcaaaactgaaaaagatgttattggaaaaccgattactaatttgcttggcttaaaagatgttacaattcaagatctcttaagtacgcaacaagaattagttgtgcgcgtaaatgacaatacaagagatgaaatgattttacatgctaacttttctttaattcagcgtgtaactggctttgtttcaggtctagtttgtgttttgcatgatattacgcaacagcaaaaaaatgaacgggaacaacagcaatttgtgtctaacgtttcacatgaacttagaaccccattaacaagcttaagggcatatgttgaagccttaaatgatggggcatggaaggatccaaatattgcacctcagtttttacatgttatccaagatgaaactgagcgaatgattaggatgattaatgatctccttagcttatcaagaatggatcgtggtgtagccaaaatggacttagagtgggttaacttaaatgattttgttaaccacgttctaaaccgttttgatatgatgctgaaatctgatacagataaaacgcataaaaagaagtattcaatcaagcgtgaatttcctcatcaagctttatgggtagaaattgatactgataagatgatgcaagtaatcgataatattatgaacaatgcgattaagtattcacctgatgggggcgttataacagttcgccttcttcaagctcaaaagcatgtcatcttaagtatttctgaccaaggattgggaattccaagaaaagacttaaataagattttcgatagattttatcgtgttgacaaggctcgttctcgtaagcaaggtggaactggactaggattagctatttctaaagaaatagtagaagcacaccatggccggatttgggcagatagtgctgaaggttccggatcaactttctacatttctttgccatatgaagcaattagtgaggaaggagaaaactgggatgaggtttaaagataaagtttctagagtggcactgcgtgttagcttaattgcaatggttgtcttatcaataattttatcggctgtcatttggggatcagatgctcgattttctagaattgaagaaacatctaatcaaacgcaaactaaggatctaggtcaacgttctttaagagacatctatctaccaacgcaaactttttattttaaaaataaaaagatgtatcaagtctatgatacaaagaacaatttacctttggagttttctaaattaactcagtctttaagacctctcttgccaatccgaatctggtctagtcaaactaagtatgaaaaaatgttgagaaatccaaactatattcagctaacatacccagatcagataacgatctcattatttttaactaatgtaagaaaaaatgatagtcgggaatttaatcgcatttttgtctcaacgacttctagcgactacatctatctaggtaatgatgagaaccatacactctattgcattcgtttaaacgatgtctcatttaagaccctaattgagcatattagaaacgctcaaactcaaatgccagtcactcttgaaaaggtgcatgatgactatttacctttctatgaaaaaaatctaagcttgccagtttatagctacttaactaatgaagaatctgattcatattttgtttatcgcttgttaggatcaaataatccgacccagcataataatggcaatacaattacctactctaatggagtatatgaacgtttaatagctgctaagcatactcataactatgaatatattgattatcagcaagatcaaattcctaagacaattagtcgaaaattaaatgatagtttatattttgtacgaaagattggtttatcagaaccagatttaagattctttgatgcagacgacaatacagttatctatcaaaattatgtcgaagaatatccaatctttttaccaggaaaatataagatgcgagcacaggtaaaatttgcacctaatgggatgacgattaacttcaatagtttagacttacagattccaattccaactaatggggagaagaaaactttaattccaactactgaggccatggatgagttataccaaaaaggatatcaccgaaaagatattgaaagaattattattggatacacagctaaatcttctaacagtaaaaataagaaattggtagatttagagccagcttattatgtaaaaattaataagcagtggaagaccttagatgaatggcttaatacaaataatcagttagatagtgcaggaaaggagggactagtagatggactttaaaagaattgaatggatatttttaattgtatttatcgggattaatatctttttgggaattgagttatggcaaacgccaactctcttatctgctggttctactccgactcagactgatattaagagtgagacaagtgctgatcaaattactattccgaaggttaatgataaacaagaagatggatattatttggcggctaagaatgatgactcgtggatcaaaaaagctactcagcaggtaaaaggacaagtagaaaataattcaagtgaaaatcttatttctgttcatctagataagccaattactttatctaaaaataaaaaagaagccctaagagaagtcatgcgttttaaggatgatagtcaaaatgtatatcaaggtaaaaactatacctacctttcagaattatctgagggggacgattatatttttaaccaaaagactaaatatggagaattttttgctgcaacagctcggcttcacattattgtaaaagataatcaaattgtttcttattcccaaagctatgttgatgacttaaatcctgtccgtgaacgccaaaatacaattagttcaaaagccgctgtagactctttatatacttacagtgaattaccaaataattctaaggttatcttgttgaagcaagtctatactaaattattaacagttaagggaaatactatttatattccaacttggttagcagcaattgaaaataatacttctaagacagtgaccttgaagcgtgtaaatgcatttacgggaacaattattcaaaataatgttacgactgatgattttaaggagtgaaaaatgtgaaagtatcagttttatcaagcggatcaacaggtaattctactttaatagaaactgagcaacacaaaattttgatggatgcaggtttatctggaaaaaagaccaaggacttactagctcaagtcggagttgatattaaagatattgatatgattttcattagtcatgaccataccgatcattcagggggcttaggagtcttaatgagacggtatccacaaatttcagcttatgcaaattcaggtacctggaattatttaattgaaagtaagaaaatcggtaacttgcctgttgaacagatcaatacttttgaatctggggtaacgaaaacttttggtgacttagatgtgactagttttgctactagtcatgatgcagctgaaccccaatattatgtttttagcagtggcggtaaaagatttgcttgtttaacggatacgggatatgtttcaagcaatgttaaaggcgaaattaaggatgcagatggctatttaatggaatttaattatgatgatatgatgcttagaaatggaccgtattcttggtctttaaagcatcgaattatgtcagatgtgggacatctttcaaatgatcaggcagctgatacgctacttgatgttgtttctccaaaaactaaaaacatctttttggcccaccgtagtcaacataataatactcagtatttagctcatgagactgcccgtgatttattaattgctggggatgcaaatctgcctgcagatgttaagattattgataccaatccactagaggctggttcactcacagaaatataatttttagcaaataatttgacttgaattcataaaaaattcaaaatttgtggttaggctagagtgaatagaaaaggagattttttatggcagaaaataatactaagaactctaataaacataatgctcttattaaaactggtattgtgggagtagttgcaggattactcggtggtggagtagcttatgcagggttgtctcaagttaatggacagaatgctccacaaactactgttgctccaacagctaaggttgaaaagtctaacagtaaaaatagcagtcagatgactaatgcctttaatacggtaaagaattctgttgtttctgttgtaaacttgaagagacaaagttcttcttcaactagtgacccatttggcatttttgggtctgatagttctagttcttcaaagaagaattctaaatcagatttagaaacttacagtgaaggttctggagttatttacatgaagtctaatggtaaaggctacatcgtaactaataatcacgtggtttctggaagtgatgaaattcaagttattttaagtgacggtaaaaaggtaacagctaaaaaagtcggaactgatgcagaaacagacttggctgtcttaactattgatggtaaatatgttactcaaactgcccaatttggttcttctaagaacttagagccaggtcaacaagtaattgctgttgggtctccacttgggagcgaatatgcaactagtgtaacccaaggtattatttctgctaagaatagaacagtagatgtaactaattcatctggccaagtaactaaccaggcaaccgttattcagactgatgcagctattaaccctggtaattcaggtggtccattagttaatatgtctggtcaagtaataggtattaactcaatgaaattgtcctcttctagtgatgggactgctgttgaaggaatgggctttgcaattccgagtgatgaagttgtttcaatcattaatcaattggttaagaatggtaaaattacgcgtcctaaattaggtgtaagaattgtatcagttgatgaattaacagaatatggccgcaagaaacttggtttgcctgatagtgttaaatctggtgtctatgttgctagtgtgactaagaatggtagtgcagataaggccggcattaaggctcgtgatgtgattactaagattgatggcaaagatgtggatagcgttgtttcactacatacagctctttatgcacataagattggcgatacagtaacccttcaagtggttagagatggaaaatcacaggatatcaaagttaccttaagttaattgaatattattaaatagaggcaaaaaagctatgattatacgatttgtaagcggtaatcatagctttttcttaatatttaaagcgtgaaacctaataaagttcgtattttaaaattgtcaagatgttagaatgatcaaatagattgtgggaaaatgtggaaaactctgtggattgtgtataagttagcaataataaaaataaaaatgtggaaaacttgtgaattgtgtgtaaataaagttctgatttttttaaagttgaactactgttcacgcccagtatgtaagggatagagcgaaaagtttggaaaattaactaaatttataaaaatgtggaataaattttgtaaaaaagttatccacttttttataaaccaaaatttgttgagaagtaattgagcgaaccactaaatatagtttgtagtaatccacagccgggggaaaactcatgtggacgctatgtcaattaggggataaaataaaaagctagatgtgtgaaagggataaattagtatgaatataaaaattgtctgtgtagggaaattaaaggaaaagtattttaaagatggaattgcagaatatgtaaagagaatgagtcgttttgcaaaagtaaaaatagttcaagttccagatgaaaaagcccccgaaaaactaagtcccgctgagatggagcaggtcaaagaaatcgagggaaaaagaattttagataagataaaagataaagaatacgtttatgtgactgcgattaagggcaaggaaagaaccagtgaggcttttgctaaagagttatctgatttaactacttatgggcattctgacatcacctttgttattggaggaagtctgggtacaagtgacgcagtaaataagcgagcagatgacttaatcagttttggtaaatttacaatgcctcatcaattaatgcgcttggttttaattgaacaaatttaccgtgcatttatgattaatagcggcagtccataccataaataattatttgagaagaaacaagattggttgaagtagtactatgatgctactaaaaataagccagtctttttttgttaaggcgatcggaacaattacacttctttctttgtcttcacgatagccatgtgaaatcattccatcagctaaactattagaccaagaaattgcggctaaaattgctttaaaatataaggccggtgagtagaaagataaatggtagtgtctcatatccccaactaggcggattcgattcacttcggcatgaattttgggaataacattaaaggcagctagagttccataagcaaacttactaggtaatttaaaattttgttctagtgaacgagctagagcaagaaaagaagtcgtttcagtgaaagcagctcctaaaaagacataggcgtaaattctcgtaaataagacacaggcttgataaagactgcgactaggagtgaagtagtaaattgtaataaaaactacggaagccgcaaataaaggaatgataaataataaaaatagcttcttaagattaatgtgcttaaacagaagatagataagacaagccccgataataatgaggtttgctcctaaattaggcacaagtgatatttccagagaaataattaagattaaaaataattttagtccgggattcattttatttacccctatttagcgtagaaaagttgttggtcttttaaaacaagatgatagtcacatagattttgaatctgatcgagctggtgactaattacgattaagctatggttttcatctaagaagtagttctttagtaaaaaaatgacttctgagacgcttttttgatctaaaccactaaatggttcatctagtaataaaacgtccggataggccattaacatgacgagaatttgaagcttccttttttgaccaccagagagagaataaacgacttgatcatccatattttctaaattaagtttagttaggatagactgaagtttagactcatttaaagaaggattttgattgtattttaagctaaaatctaattcttcttttaccgtaacatttaagaattggtcgtctggattttgaaaaatttgtcctacttttgacaaataagggcggcgacgccattttttaacctctttatctttaaagagtagttctccctgataagtaataaccttgcttaaggccttaaataaagaagttttaccactaccattctctccagttaagagggttgctttcccagaatagatttttaaattagttgaagaaagtaactctttttctggaaatgatagtgaaaaagaattaaaagaatatactgattcttgctttggatgaggaagagaaaaattggttactacttcttcttgagaaggtagaggagtagtttgaattctttgatttttgatagcaaaaattttgggatcgattttttcataattagcaaagttatgatcactaatcaaaatcgttttaccttcttgatggagtgaatctaagcagttaagcagaaaatttcgattatgagagtcgcaattagcaaatggctcatctaataagaagaggtcactttgcattgcaattaagacggctaaggctacatgctgcttttcaccgcctgagagatgaaggaagggacggtctaacaaatgcgaaatattcgttttatggctaacctcatcgataatcttttgagcagtaactcgatcaattagtctattttctaaagcaaaaattaactcttctcttggtgttgccatggtgaattgacgattagggtcttgaaagaccataccccaattagtaaatggctgatttaaagagccagtagtaattttgctgttagaagtaggttcaagaccagcaactaattttaaaagggtagattttccgctgccacttggacccgttaataagataaagtcgccttggttaatagtaaaatctaaattcttaaaaattaatttgtcttggtattgaaaagagagttggttaattttgatttgtttggatgacatgagctttttctaaaagatttacgattaattttactaatacacaggtaaataagagcatggagatccagcgaactacaaagtagagaatcatattaaaggttgaaaaatagctatagccattttttatgaaatcgtacaaataagtgataatggttgtggtcgtagcagataagaaaagcgtaaaccaatcatatcgacggtagctagtaaaggtaaaacctaattcactacctagaccttgaacggcaccagaaattaaattaacagctccccactgttccccagcaatcaattcaacgcaggagcctaagaattctcctaagaaagcagagccagggatgcgaacaagaaagcctgctaatggtcctgccatacaccaaattcccatcataatgtcattagctaacatcccatagccgattggagtaaggagagctgttagggcgttatagagaccgtcactagctaaataaataaaaccaaaaataatagcaattaaggcaattaagatgatatctcttacatgtaattttttcattttttcctccaaaaataaaaagccaccttaaagaggtgacttaaataaaagtctaaaaatagtcattttccctacgctgatattaatcaaacaggttcaatgggtatattctcagcccgataggcaccccagatgtatttacagtttaagcttacgcttaataagactaaaagacaattaaaaataataaaaaggttataattaaaacagaatagaatcaaaggggactgattgagatggcaacagcgacattaaaaaattatttattaagtttaatgcaaaataatcaagctagtgaagtagagcttcgaacacagaattttttgtcctaccatctttatttagaggggatgcattatgactttattgaatatcagtccggaagtagtcaattaatatattgccttgcaggtaaatgtgaagtacaggtagggaagcagtctttttctttaacaagtggaaacatcttattaattgaaaaagatagcgcgtatgcgatcaagcttagtgacaagaatacagtaattataaaatttaagctgaccagcaatttttcatgggaagagcaaatagaaaacgtaacaattgatactcccactgaggagaaactaagtaccctatttttaaagaatttatctcaggataaagcctttttgttcacgactacctcagtgatgtggagtagccaaaatatcagagagatagtgcaagatgatcttaatcatgcggcatttaatagcacaattggattagagttacttaaagtagtgattttgcgcaatttacgtgagcagaactttaaattgagtgaaagaagagaaaatagctttaaggatgagacactagatcagtatatcgaccaacactataatgacattactctagcagaagcggctaaatattttggttttaatcgaaattacttctctacaatggtaaaagaaaaaactggtaagagttttgtggaacatgttgacgatcggagaatgagagaggctagaagattactcgctaagccaaatgtatcgttaaaagaaataatcgaaactattggttattcaagtaagtcatttttctataaaaaatttaagcattattatggaatgacaccaacagaaatgagaaagagattatttagagaagcgcatattaatttgaaataggtatgtaaaaagggatgcaattgcatcccttttattacatattttttaatctcttaattcgatccgcagtagatgggtgagtatcaaagagtgagcttaacccacgattatgaagtggattttcaatgtagagcccagcacttgatggatctggatctttcattggctcactgttagaaatcttctctaaagctgaaattaggccttgtggattcctagtaagttctactgagcccgcatcagccagatattctcgattacgagacagagccatttgggcaagtcctgcagcaagtggtcctaaaattagggtaaaaacaattgctactaccttaaaaattgcttctaaaggacttgagtctcggtcatcgcggtctgaattgctgccccaccaccaaatgcgagaggcgaagttagaaataaaagaaattactgctgctagtgcaactccaatagttgaaactaagatatcataatttctaatatgagaaatttcatgacctaaaacgccctctaactcacttctatttaatcgttctcgtaagccagttgtaacggcaacataactatgcttaggatctcgtccagtcgcaaaagcattcgggcttggatcattgataataaaaactcttggcatcggaacttgtccagccagagccatatcttcaacaatgtgccaaagttctggatcgtcttcttcatgaatctctcggccgtgattcatgctcatcactaggtttccaggattttgaagaacaataaaaagataaattaaactaccaataagagcaatggcgattccggaaaaaggttcgccattaattaagtatcctaacccaccaccaacaagagctagaataataacgaatataacaagcaaaaatgctgttttacgcttattgcgtgctatttgttgatagagcattaattaacctaaaatttgacttgaggaacggccttttcttcagttggtgtttgaagatagtccattttcttaaagccatgcatcttagctactaagttagatgggaaagttagtaacttctcattaaacatagcaactgttgagttataaagttgacgtgagtaggcaatcttattttcagtattagtaagttcttcttgaagtgctaagaagttttggtttgcttttaagtcaggataattttcagctaaagcaaaaatactcttcaacgaatcagtaatttgattagaaagtttattagcttcttcgtgatcagaagctggaagatttactaattggtttcttaatgaaactactttttctaaagtgccactttcgtgcttagcataacccttaactgtttcaactaagttagggattaagtcattacgacgctttaattgaacatcaatttgactccaggcttcatcagcatgaaccttagccttttgtaagccgttatagatgccaatataaatagctaccaataaaattaaaataatgataataatccaggttaaacccataaactgaatcctttctctatatcataaatattaagctaaaaaggttaggaatattgtaccaaataacagaaaattaagacataaaaaaagcacagttttgtgcttttttagatatctaaataacaaagtctaggacgatccatccaaggattgtcaaaataattaaaccgccaaattcgaggactgaaaatatccagaagaatttgcgctttgatactgttccgttttcaacgaaacttttgaaaacaagcatgttagccattgatccaacaagtgaaccaaatcctccaatatttgaacctaagaatagtgcttcagcataattggtaaatttaccaattaagatggttgaaggaacattagaaataaattgacttgaaataattgaagttaagaagacagaatgttcagagaacatagtcttggaaataagcgtaacgataaatggtatctgctggatatcactaataaaaataaagaagcatgtgaaagttaagagcaaagcataatctacatgtaacataattgaaggattaataataagagccaaaattacagcaacaattgctggaacaatattaaaaacaccaaagaagaagaaaattgaaacagcaatagtcaaaaccattggtctgacactaatcctaatatcctctaaaggaactgtaggaataggtttatctttaacaaaaaagatgaataataaaacgataattaaactgaccagcaataatggaagtgaccagctaaaaaatttaagtggtgaaacgttatagcgattaactacaaaaatattgtgaggattaccccatggagtaaaagcggctccaatatttgctcccatcccgattaaagtaacaggtagaatttcaggtaaattgtgacgtttagcaattgttaaatataatggtataagagttaaaacggttatatcattagttaaaaacattgcagatacaattgataagattgtaaaaattgcagttagtcttcttgtacttctagcgctagctgtgagcttataagctaatacatccaaaacgtgtaagtaagaaaaaatttggataatagtcagcatcgctaaaattgagtatagtgtgtggaagttaatatcttcaatccttgggcgggcgaagaataagcttatgatcgttatgacaaccgtaatttgtaaaatacggtctttagcaatatttttgatgacggtcattaatgtcccctcttaaaattaaatcaacactactattttgaactctttagcgtaagttcgcaacgcttttttcagattatactttcctattaatatcattttgagcattttattagggaaagaagagagaaaactgctatatttaagttagtagataacataggaggaatagactatgcttgattcaaaaaatattgaactaaaaataaaagatggtgctagagaagttttagaaaagaagattaaaccgggacaagttgtcttgttagccttaaatgatggctcaaacggctactctaaattaggcggaacttgtacgattggtgctaattttcagcttgttttattagatcataaggatcctgcctttcctattaaagttaaaaataatatggatttagatatgtatgcatctgataaagaattagcatttttagatgatggattagttcttaacgcgcgtaatgctgtcttatccctatcttcaaatgaagggattattgatggcggagtcacaatttctgaatttaagggtgaaaaattatctgcagatgagatgaaaaaattaggtggaaaaatctgctaggtattgaagtgacgtgcttcttcgtggtatgataataaaagattttcgaaaattttatttgagaggaagtatagatctatgcgtaaaggtgaaaactacaacactggtgttacaccaaacttaagacctaagaacaagaagaattctaaggctcgtgttaagagagctgctgaagtagttgctttcttaaacaaagctgctaaagacgaaaacaagtaattaaatttactactcaataaaaggagagacgctgtttagcgtctctccttttttgtatcgaaagttatataaatcgaaattaatataataacattttgttgtatttgaaattatattactatataaattgtcttatagaagacaaagtaataaagcataggatataagttttaaaatgaataacatttcgataaaagggctagaattaaaagcaatttttgcccttattttgccgtctctttttttaggagtagcagataatttttcagataatgttttttggggagttgcgatgcttctggtattaggtgcatttgttggtctaattttgccaaatattgttagtacatggcttattttaattttaacggcattgggaatcagtggcttaacccttggctatgtaagattagatatttatgctaaggccatattattgctctcgtttccaatagaagcctatctagcgagtcagttgagagaatgcatttttaaatggagtatctataagaaaaatgaagctagtgtttatcgctatattacccactacgatcaaaatgtaaaactccaaacgacttataatgcacaaaagctttaccaaaagattaagcagaattttaagagaaaaaagttatttacctttgtgggaatgactttaccatcattaaatgggagcatgaacaacagtttgctcagtttaatttagaagagcatagtcagattttaaaacaaatagctaaggtacttaaaaagagtagattagttgatgaaaatttatattacctgggaaatggtgaatttttaattatttctaataccattgcacctggaactttgatggttttgaatgatgaattaaaagacaagcttagagctttaaaatatgaagactatcatccggcctttaaaatggttactcagcatattgttgagaaagatttgaaactctacccggatcttgatgcaattcttaaacatttaaaacgaaagcttgaaacagatttagtggttgaatatttaaagggagtagaatcatgatagacgttttctttatcttagcgattttagttacattaatatttttaattgcattttttgttatgattcatagtctttggaccatttatcatcaaactgaacatacagtccttcatttaggaaagcatcatcatgttaaataatattttagcattttcaactttagtatctatttggttttctcttttggcatcactagtaacgctttatggtgcaattcgtttttggattagacatagtaaaaaaattgtttatattactcctctaaaacgctaccctacaattacgattgtagtgccggcccataatgaagagcttgtaattgctaaaacaacaaaaggaatccttgatttaaactacccggtttcaaaaatagaagtacttttatatgccgataactgtcaagataagacagctgttgagatgcagaaggcagttgatatgcctgaatataagtatcgaaacgtacaaattattgaaagacagggttctggaggaaaggctggggttttgaatgatgccttagaaatagctcaaggcgaatatatctgtgtctatgatgcagatgcattaccagaacaaaatgccttatattttttggttaaaaaagttttagagaacccaagtcgctacatggctacctttggaagaaataaaacacgcaatgcaaggcaaaattttttaactagatgtatcaatcaagaagtaattgtttctcaacgtattcaacatgttggggtttggaatttatttaaaattggacgaattccaggaacaaatttcatcattaataccgagtatgtaagaagtattggtggttggcaacagggcgctttaactgaagatacagagatttcttttcggattatggaagatggatacttgattgctttggcttataattcagaagcatttgaacaggaacccgagcaattacgtgattattattatcaacgattgcgctgggcaaaaggaaactatcaagttgtgataaataattttaagcatttatttgataggagtaattggcgggttaaattagaaacattttatctaacttgtattttcttttggtttaacttagcagttgttctttccgatattatcttcttcgtagatttaggatgtgtagtgataagatttttcaatcctaagatgccaattatttttgcaatggattctaacctcttactgatgcaacttttattaattaattggttattgatgattcttttatatgtaactcaaatcaatttggccttagctacacagtatggacaagccactagtgatcaaatttggttagcattggggtcgtattttacctattcacaattgtttattgctatttccatccaagcagtttgttcagtgatcggagataaaatttttaagcgcgatgggagtaaatgggtaaaaacaaagagatttgcagattagggatagggcatgagagttaaaaatttaatcttgattttaggtgtgatagtagcttatttaggaattatcggatatgtaaggatgagcaatgatcgcacaatagaaaaaagatattatcaagtttggcgagaagactatataaaaaatcaaagtgaaagtgagcagtatgttaacgcagctggaaaaaataagacaccttttgccttgtctgaagcacagggatatggaatgttactagctgtgaaggctggagaaaagcacttaggaagccaaactgattttcaaaagttggataattattatttaaagcatcaattgtctaattcgaacttaatgagctggagacaagaaaataaaaagggaagtttacaggataatccagtgagcgcaagtgacggcgacatgatgattgcacaagcattgcttgaagccaataaagtttggccagggcatggatataaagcacaagcgcttaaactaattagtgatatcaaaaagttagaaagtaatcgttcggctaaaataattactgtaggaaattgggcaaataaaaaatcacatttttataatgtaatgagaacatctgatgtaatgccacaagcatttgaagaattttatcaagcaactggagatcggagttggttaaaagtaaaatcacagatgctgacttatttacagcagcttagtagccaacataaaacaggactagttcctgattttgcctggatttcaaagcaaaatcaggcgtctcctgctaaggctaatgatgtagcaaccaaagatgatggtaattacagcgctaatgcttgccgagttccgatgcttttagcagcaagtgatgataaagaagcaaataatattgtaaagaaaatgttgagcttctttaagcaaaatgaagaaacatcaagtggatttaccttgagtggaaaaccgttgtatcagtatgaatcggcaagctttagtgcgccgatcttagtagctgcaagtaagtatcaaaatgaaggatatggtactttggtagaacatgaaaaatatattttttcaaaaccgcttcctgttaataattactacgatgcgacactaattgttttagctgctttaaatacaaatgagttgacgggattagagaaatagagaaagattaaggtgttaaatctttctctatttttgatttgcaagagtagagtggttttgctatgatagtagaaattttagacatttttatatttctggaaggggtaagtttttatgggattaaatgcgtacattcaaggttttaatagtttagagtcgatcgaccgtgcaccaggatattttaaatatcaacaccattctgtagctgatcatagctttagaacagcagaacttgctcaaatgatgggagatatcgaagaggtcattggtaagcaaaaagtaaattggaaagctctttatgaaaagagccttaaccatgattatactgagcgttttattggtgatatcaagactccagttaagtatgcaactccgcaattacgtaagatgattggggatgttgaagaaaccatgactgctaaatttattaaggatgaaattccaaaagaatttcaaaaaatttatacaaaacgcctatctgaaggaaaagatgatactttagagggtaagatcttatctatttgtgataagttggatttactttatgaagcttatggtgaaattgaattaggaaatccaaatcctgtgttcatgcagatgtttaaagaaagtcttgaaactattaaaaagtttgatgatttaacttgtgttcaatactttattaagaaaattttgccagatttatttaagggcgattttgccggtaaagataaaatgcaaagaattgcatttagtattttgttaatgggggaagaataggttgaaattacagtgtgcatcctgtggtttacgacttgatagtcttcattttaagcaagaagggttaatgaaccctaagttgacaagtatttgtgatatttgtttaacaagaaatttggatgcagagaactatgaaaatccggtagttgaaagtatttcccaggtgatgctctatagctttgtaggaaagaagaataatggtcagattaagccggattctttaaagcactatcttgtagacaatactaataggcgacagtatgagtcgttcattcaagattatgatggcaatgaagttgctttgcaacaaatttcacgtcgtgagtttaatttagcaattattaagagtgaagataatgaaatagactatgttcctgagaataatgttgattttgcagtaaatatgaaaaagatggggattgaagttgatttttctttaaatgaagttgactttgtagatcgggaacgaattcggcataagtataattaccgctgtcagtattgcggccggcgtggaacgagtgtagatcacaaagatcccgtttctttatcacatgataattcttttgataatttgattttatcgtgtagtgaatgcaataagattaaatcgaacatgccatatcaattatttgttaaattgaacgatcaattaactatcgtaaataaaaagctagttaagtatgaagatgctttagctaatttgaaggaagagtttcaagctgctaaaagagacttggctggcaaggttcatttaaaaggaattgtgaatgatccagaattaaatgcaattcggaagcaaaataaaaaattacaggacgcgattgatagtttgcaaagtgactatggtgccttgcgtaatgaacgcaaaacatactttgatattggttggaaattagaaaaagagcgagaaaatagcgaaattatttaattctaataaatacaaaaggctagtataacactgatagtggaatactagtctttttagatgattaaagtatttttttgagagcttaattagtactgttaagtttgcggtagccgaagtaaaattgaaggcaagctaaaactacgttaagccaatttagccataagaaacaatcagctaatccaccggagtgagcaccagtaccgtagtaaacccaaaaaccaataatcactgctgctacattaatccaggcaaaggatttttgatatgattgtttgtttaatacaaaccacatccaaataacatttataataaaccagattactaaaacccaaaatacaaaatcaaacattatgtattttcctttcttttacgtttaataaagtctcaattagtatattgggaccattcgctcttttcgggaatagtatgaatcctaggaaccatgatttcaataatttgtactttgttaaaagaaaagatactaaaaataaataggtagataacaatagactaataaaaagtctgatagttcaatgtttataacaaagagtatcagcctttttataatttataggggaaaagcaaattctatattattttgcttaaagttcattatttctgaagttacgtaggaacttcttagtcttttcttcttgtggatcgttaaagatctgttgtggtgttccttgttcggtaataactccatcactcatgaagacaacttgatcagatacatcacgagcgaatcccatttcgtgagtaacaatcaccattgttagtccagtcttagctagtaattgcatggtattaagtacttcaccaaccatttctgggtcaagggcactagtaggttcatcaaagagcagaacttctggatccatagaaattgcccgagcaattgctacacgttgttgttgaccaccagataattgttgaggtttagcagtaagaaatggatccattccaactttctgcaagttttcaatagcaacttttttagcttcttctttggagcgaccaagaaccatttcttggccaatcatacagttttgaaggacattcttgttgttaaacaagttgaattgctgaaataccattccgaccttagaacggaaggtattacgattaaaatgaggatcaagaatgttttctccatggaagagaatttttccattacttggttcttcaagaagattaatacatcttagcatcgttgatttaccaccaccagatggaccaataatggtcattacttctcctttattaatattaaaagaaatatcttttaatactgtatgatcaccatatttcttttgtaaatgttgtacttgtaaaatgttttcttcgttattattgttcatgttcaaatccagtctcctttggatcttctacttgtaattgattagccattaagttgtagttctttggaccttcaagcttcttttcaatgaaattaaagattctagtaattgagaatgtcaagattaagtagatcattgaaatgatgaagtaagtttggaagaattcgaaggtttgactggcaacagttgtaccaacaaagaacaattctgaaactgaaataatacttaatactgaagtatccttaatgttaacaataaattcattagtaattgatggtaaagagtttctaattgcttgaggcaaaataatatgccacatttgttgagagtgggtcataccaagagcagaagctgcttcaaattgtcccttaggagttgcattaataccaccgcgaataacttcagctaggtaagcaccggtattaattgaaacaataactaaggcagcgacggtacggtttaagttaaggtgccataattgagcaattccgtagtaaataacagctgcttgaaccatcataggagttccacggaatacttcgatataaactgctaaaagccagttaacaatctttaagccccatcttttaccagtagacttaggagttgggatagttctaacaataccaacaagtaaaccaatgaagaaaccagcaatagtaccaactaaggctaaaagaagagtcattccaacaccgccaaggatcattgaaccatagcgacgcataattgacataaaccaattttccttcttactgccacctgcttgaggttgttccttaacagcttgggccattaattggtcacgctttttattagaaataccttttaagatattgttaacttgatctaataattcagtgttacctttcttaacaccaattgaggtaattgagtcttcgtaaggaatgtggaaaccttgcatcttgttaaggttaacggcaacaatgttagggttaacagtcttgtaactttgatattcaatatcttcagcaacataaccgtcaatagtacctgattgtaaactttgacgcatagcagaaaagcttctcattgcaggttcacgcttagcaccatgtaattgcttgattaaatcgtagtgaagagtaccttgttgagcagttaatttagctcccttaaagtcatttaagccttttgcttgagcaaattttccatctttattggtaattactacgaaagtaccttttctataaggttcagagaaattgatagcctttctacgttcagcagtaggagacataccagcgataattaaatcaatctttccagaagttaaggctggtaataatccatcccattcagttttttctactactactttacgatgaagctttttaccaatgatttttgcaatttggacatcatatccgtttgcatattgcttagatccatcaattggaaccgcaccatttgcatcagttgtttgagtccaattgtatgggggatagttagcttccataccgatttttaggggtgcttcttttttagccgcttcggtttgattagaattaaagctaaaaccgataactaaacttaaaattagggctaataaagcaccaaaccatcttatttttgacttcactttgaaatacctccaaaaattatttcaaataaagccaatacaataaaagcgtaaataaaaagcctcgttgtttgccaaaaacaacgaggcttgaaaatcatcagtaattaaaccaaatcatatagcgctccctggggacgaccaggacagtatgtaagatattctcttacataccaacaaattaacttcacgaaagaaaatttatttcggcggtaatcctaaaatatactctcactgtattcgcgtactcaagtagattctgtgattatcgcaacctctattgcattggggatttatttaactgatgaaaagattaaacgatttttaatcttttgtcaaataaatccatgattttttttgatatcttttttcttaatgtctgaaacataaggattaccgctaacgatgaatcttaatttcttctgagcccattcaggatctgattgattaattcctactcttggaagggcaacaatttcttctatttcgcgtttgtgatcgatatcaatatcaaaaggcgaatcgttcaaatcaaccaaatcccatttacgactagtaatccctaaggcttgcatcatttttccaggtccattagtcaaaagcggtcccgttttaccgctacggtttttaatcatcgtgtcaattcctgttagaggatcgatagctctgattaatactccttgcggttcaccttcttcttgacaagaaacgtcaaagaaaaaatattgcctttgggaataaatatataaactgccacccggccgatataaaccctcatttgcgggactacgtctgccgccataagaatgagcagctcggtcttttacaccgacataggcttctgcttcaacaatagtaccagatagaatttcttctccattattgtaagacaaggttctacctagtaggtctttactgatttcgcttgtagaacgattagtgaaaaattctgtgtaattcatattaatttttctttctaaaaaaagttgtacactgataattgaagataaatattagcagcgagtgaggaatgtaaccatgaatgaaataaaagtagttagaatatatgaccatgagcaaccagctggttatcgaattttggtagatcgtttgtggcctagaggaatgagcaaggtaaaggctcacttagatgaatgggataaagaaattgggccaactaatgaattgagaaaatggtttaatcatgaagacgataaatatcctgaattcaagtctaagtatatagcgcaattgaaagctaatccagcaacaccagcttttattaaaaatgtaaaagaaaaactagtcaaagaaaatgttcttttcttatatggagctaaaaataaaaagtacaaccaagcagttgtacttaaggaatttattgataagcaattaagttaaggcattttcttaccgtgtacattttgtcgtacatagtgaaaaataattgttaaaataaccgtgccaaatacaataccagcaaagattgcatcaggtaatttaaagtttaacggtggcagtgaaataagcagtttaatcgcaataattgagattaagacataggccatagtctgaagctctggaataatttccattagcttaataataatttcggctacgccacgcatgcataaaattccaatcattccaccaactagaactactactgggttatttgacatggctaaggcagctaaaaccgaatcaattgagaaaacaatatccattgactcaattgagattacagttctccaaaataaggaaagatggtgctttctttttttggagttctttttcttatgattctctttttttgcttcttcttttttagcgacttgttcgggatgtcgaacatcataaaagtatttataaactagataaagtaaatataggccacctaataatttgatttcccagaagttaattaagtaagtaccaattccaattacaatgaaacgaaataaataggctccccataaaccataaactagagattttctttgttcatctttagtgggtaatacttgtgtttgagctgctaggacaacggcattatcaacggaaagtaaacattccatcaaaattagggtaagaatcatcatccaatcttgaccgctagttaagacgtgtgcccaattattagcgtcaaaaaaaggttgataaagtttaattagctgcatttaaatagccttcttcgagatttattaaacgttgtttttctttctctcccattctataacttcctaccttatctggagctaaaactacacgatgacttgggatgaaaattaaagatgggtttagagctactgcatgggcaactaatcgaactgaagtagaaccattgatggaagctgctaggtcacgataggaaatagtagtcccatatggaattattttcaatcatttttacaaccttattttgaaatggtgtcccaaaacttgaataatcaattggaacagtaaaagaatggcgcttcccagcaaagtattcttttaattgttgaacataaggagcaagtttttttgagtcttgaatcaaaatatgattaggatagaatcccaaaatggatgcttcaatgttactattctttgatccaacaaatgctaatcccaagttgctgataactagttcatagatccatggtttaatttcaacaaaatcataatagaaaacttttgcttgggcaagtggcatttaatcctaacctttcttttaattgatatattaactgtaccttatattgtacaacaaaaaataacataaggaggagggaaacaaattaaataaaatgttagttaagataatagcggttatatatataatttgtcaaatactttttcagcattctcaataattgttgaaacttctttgggagctggtacaggagtattattaactacccaaatttttgcattagcttgccgataggcgagaagttgagcaaaaggataaacaacaaaacttgttccggcaataataactaaatcgctatcatgaatcttttcaacagattttgtgagtactttttcgttaattggttcaccgtataaaacaattcccggacgaattatcccttgatccttttcatgaaggtatgattttttatagctgtcatatgaaattttttcatgacatttagtacagtagatattataaagatcaccgtgaaattctatgacgtgtttattgccagcttttttatctaaaccatctacattttgagtaattaaagttccatttttattgcaactagtagcaattttttgatgaataatattaggttttgcatctggaaaatacatattttccattacgaagtgatgaaatttagctggttgatgaaaaagagtttcttcacttaaaatttgttctgggctttccgaaatcccattgtaaattccattttttgaacgataatcagggatatgcgacggagttgaaacgcctgcacccgttaagtaggtaatatgatgagctgcattaagatcagcttgaagtgcagcaatttgcttatctacatccataattaaaacctcctactattattaattttcagctaagtcaattatagaatgctgagagaaaaagtggtatttgttataattaaagtaagatttttaacgttaataaatacttttagaaggaaaattatgtcacttttatatatttcttttgatattttgctgattggctatattttttatagctggtattggcaagcaaacattgattataaggcccgctttagaagttcctcagttatctgggctctaatttttttactaatcggtttttatttagattatttcactgatccaacagttcttatgaatgtttttattgctacatttttgctaatgagcataattgatggtgttagtgggctagctaagaagcgtctagttgtaagtggatattttaagcgaacagttaagtatagcgacattgctcacgttacattaattacagttcccaatcctaaaaagccaactgtaatggcaatctttcaaactaataatcgtcaggcttactatcttagattctcacagcaggttagtgatgtgattgttaatatcagaaaacatctcggctcaaatgttggaatagaagtccaatcaatgatgtaaagttaataaaaaagggtagatctctaagtactcatattgcgagtagggaggatctatcctttttattttatagaatgggagaaagtaatctagaaaaagcttgtttaaatcgaagataacgcgaccagttatcggtaatttctaaagtcaattctgtacatttagctaaatctttttcaaaaatatgatttaattcccgggtaatatttttatcgtagaagactgcatcagtctcaaagtttaagctatatgacctaaagtcttgattcattgatccagctgcagcgaagcgatcatcaaccatgacggtttttgcatgaataaaaccattatcataaacatagatctttattccctcatggagcaggtaatttgcataccactgtgtagcgcggtaaataaagggatgatcaggcattgaaggaatcatgatacgcacgtcaacgcctgaatgagccgcaataacccaagtggcaatcattggatcgtctggaacaagatagggtgtttgaatccagagtgtttttctagccatcatcatcattctaatcatgccattacgtaaatatggcgtagaagtatcaggaccatctgaaacaatttgagttgcaacatcatcttctgttagctgattttcttcaatttttggaaatagtttttcattaaatgaaattgtctgatttttatcagtaattgaagcattccaatccattacaaaacgctcctgcaacagcagggacgcggagccgacgattctaagatgagtatcacgccagtagccaaattttttgcttttgctgacatattggtctccgacattaaagccgcccgtccaagatattcgcccgtctataacgacaattttacggtgaaggtgataattcatccgatactttttaatcatgttttgagctgtgataaaggctacaacttcaccgcccaaatcagttaaaggtttaaaccaagtctttgaagctccaggagaaccccaaggatcatagataagtcttaccttaacaccttcgcgagcttttttaattaataaattaagaaatttattacctaaatcatcattcatgaaggaataatattcaacattaactgtttcttgagcttgttcgatgtctttaaaaagagcttcaaacttcttttcgccatcagtataaaaactgattttgttgtttttagaaaggggggaatcgtgcttaaagttaaagtaatcaattaaaattttggcttctttagaagtatctgttggcccagcggatttaggaacacgcgggatcatcttatttactttatttaaaccaatgtgtttttgattgttaatggcaaaaagattttcttgtgataatccacgtccaataaaaccatataaaataaagcctaaaattggaaaaattagtaaaataattaaccatgcccaagaggtagcgacagatctttttcggtggaatacaacatagaaggctaagattgtgttgacagcccaaagaagtgcccaaaattcattcgaaaaaataagtatccctcccaactaattaattattatcgttgttatggcctccaaaaatgagtagaagtctaaacaattgtaacatgcttgttaaaacggctgcgacatatgttaaagctgctgcaaataagactttacgggccattggcatttcttgtggggataaaatagccccattatttagcatccgcaaagcacgatgagaagcattaaattcaaccggtaatgttactacttggaaaagcagaactaaggcaaagcaccaaatgccaattctaattagggtttggttcattcctaacactaatcctaaaagaattagtggcattgataaattggaaccaagagaaacaattggcactaaggcagaacgcattctcattggggcataatcactagcatcttgcaaggcatgcccaacttcgtgcgctgcaacgccaaccgccgcaattgaagaggaattatagactgattgtgaaagacttagaactttattggtgggattgtagttatcagtcaaattgccggcaacttcacgaatttctacttcgtatagaccagcttgatcaagaatataacgggcagcggctttaccagtatagtttccttgatttcgaacttgatcataacgattaaaagttgaattaacattcattgaggcccagcctgaaattgctacacctagaataatcatccaaaaatatgggtcataaaaaaatggcatatagtacataattattttctctctttataaaattaatcacttaacttcaaaaatttgttaataatattaattacaaaaggattatcgtgtaaaacactgtgctcagcggcatctccccgcacctctacttcttggaaggtgtgagcaacaggagcaagaatgtagcggatcgatttagcagaaacaacagaaataaaccgatccgtattagtttcatctaaaatatttccataaatatttaaaactgaaatattggggttaaaacgtctctgattaaaaagcattcccatataagagggactcattaaaatgggtcgccctttttcattaaggcgattgacgttaggtaaatcacctaaatacattactccatcaaaaggtccagcaatcaaagcacagtgatctagatgaggaaaattctttcttaagctggttttcatctccgctttgattactgaaggagctcctaaggaatgggcgacagcactgtattttttgaaatgatatcttttacttaaataagaaagagctgctcgaagataataagaactagcataaacaccagcaattcgatccttaaaaataagttgcacaatgggctgcttatctgctgtccaagttccttctaagatgaaattaccaaatggatcaattgtagctttaagaaacttatcagtcccttttgcctcacaggcagcttggaccattttatttgttgtataatctcctccgcgaaaaccatgcacataaaatacaggtatctgttccatcgttggatctatttcttcagtaatcgagctatcttcaacttttcttttgtgcattcgtaggagccagcgagtaggagtaaaagtagccattaaacctaaaacagtcattcgagcaatgctaggttctttgttttgatgcttattgtttttttcaacttcttcactatattttttctggataaaaaacactctttttcctcccttctttctttgtaattttagcgttaaaattattctaacattttctaggttagagcaaatgaagaaaggaacaattatgaaatactacgcagtaaaaaatggccgcacaccaggtgtttatcgaacatgggaagatgctaaaaagcaagtagatggattctctggtgcagagtataaatcttttgaaaaaatcactgatgcaactgaatatctagattggaataaggaaacacaacctgatattgttaaagaagattctttaagtaatgcaattaaaaaaattaagtcagctagtggagcatctcaagctaactctaagacttcggctgactattttgccactatttacactgatggaggatctcgaaatactggtgttcataaaggcggtcatgttaatgagaccgataaagcagcttgggcttatttaattgaatgggataatggacgtacatatggttctgggggagaatttggtgccacgaataataaaatggagctactcggactaatcaatgcactggaaaaattaattgagctaaaattcaatgacaagcacttattgtttgttttagattcacaatatgttttaaacggaatcaataaacactggattgagggctggaagaagcgtggctggaagagatcaaatgggcctttgattaatgcttctgaatggaagaaactagatagtttattgggacacttttctgacagtgaatttagctggaccaagggacatgctgacaatcaaggaaataatttcgttgatcacgagttaaacaaatatatggatcaaatgaaatagaaagttcaaaaattcgtaatatcactaagagagactataattagaagtgaaagcgcataaaccaatttaaatgaggtgatattatgaaaaagttctttaaagtagttggtattggtgcagctatttgtactggcattggtgcggcagctgctgtaaccaagaagcttatagataaaaacaataatagtggcgaagatgtagttaaagacgaagaaccagagtttgaagatggagaatctgatgatagtactgaaaattcgactgagactactgattcaactgaaacaaactaattattaaaaaatccgcttgctaaataaaaaagtctgcaaaattgcagacttttttgatgcactttttttagtagttgctataataataagtgaaagactagaacgcacgcaggtactagttttgacgacggagacgactacaaagtagccgtcttttttcttagattttagtttaagataattgcaccgccaaagatacctctgaaccaactaacgatagaatcgattagtttttggaaccaatttctagtttctggagtattaaacttagaaaaaatatttttagctcctgattgaatttgatcagttaattgactagcttgttgttggaaattcttgtcttttaaggcaccagaatttttaactttgattagaacattgataatttgttctttttggttgttagtaatagtgtcgccaaggtggttaatgttgatttgattattaacaatatctctaacttggctgtcagaaatattttgaccttgcttagccatttcttttttagcaccagcaactgcattatttaattgagcatcagagtagccatctttacctttattttggctagtaattttgctcaaagtgttcatttcagtttgtgccgcattaatttgcttttggttcaaagaatccccatttttagcgtaagctgcataaaccccggctaaagcacctgatccatcaattggagtagcagaagttacataaatatctgcatcagatattccggcagttagggctgcatttttatattggttagccgtaatagttgtaatgttattatgaccgttataaggtaaaatatgaacattaataccactaccggagctagttttttgaaccatggcactagaccaaacgccggagttatcagtaaagtcataaccagacggattaagatattttacaagatcagatccagtaatggtaatggtagtataattagcgccatttaacgattgggttaaggtatcaatcgtgccttgtttttgagaggcagtcagggatgtacctaatgttacaacaggagtgtcattatcatcggctttagccgttttagtattagtaatggcacttagccctaagattccacttgataagatagcaacaagtgtagtcagtatttttttcataataaaattttctccttatgaaatatactcatttgatggctatattataacctaaatagttaactgaattatgtaaataagtattaagatgctataatcataagcaaaaggaggcagacgccgtgttacgccagccaatgttaacggtaattatgcccgtctacaatatggaaaagtatttaggtcgggcacttgacgctttagctaaacaaaaagatagaaattttaaattactaattgttaacgacggatcaaaggatagaactcgtgaaatagccgagtcataccgggatcggtttctttattttgatattattaataagaaaaatggagggctttctgacgctagaaatgttggaatgactcacgtaactacaccatattttacttttcatgatggggatgattgggtagattcaggctatactgcctactttgtcagagcctttgatgagcatccagatgttgatattgtttcttgtggtttttggattgattctgaaaagcgccatgaaagtcatcctgtcggaagtaagcaaagtggtggcttaattgataaaagagaagcctatttaaagatgaccaatgtatttggttcacccgttaagggttatacctggaataagggatacaaaattagcatcattaaaaagtatcacttgcggtttgtagaagatctggcatttatggaagatcagattttcaatgttaaatatgtatctttgactaatggcttttactacagctcaacaccttattatcattactggcagcgagcagatagcatggtgcacgaccttaatccaaagaaaataccagataattttagagcaaattatcgggtttggcgccaaattattaaaagtttgatggcagagcgtgagactcaaaaggaaagtaaaaaaatcgccaaaaaagcatctttaagtgattttgaccatcaagatttataagaacttacaactaaaggaatcaatatgaaagtaaaagttaatggggtaaagatttactatcaaaaattaggtaaaggacatcccttaattttattgcatggacatcatcaagacggtgggatctttgataagctagttgcgcccctttctttatactatactgtggtagttcctgacatgcgtggtcatggactaagtgaaggagaggccagtgagcactatcaaacagaagtagaagacttacggacctttattaacgcacttaagttagataaaccatatatcttaggttttggctctggtggcttggtagccctttctttagctgcgcaagctccagaattagtttctaaagtaatagttgcaggtacttatgttaatggaaatggtgtgaacgcaaaacatattgctgctaatacaattcgtggattttttaaaggggatcgcgatagtaaggtggccttaagagaaagtcatatccctgttgaaacgctaaagcgaataaaaactcctactctatgtgtagttggagaaagagattgggttaaagttgaacatgttcgctggtatagtcaattattacctaattgtcgcttagtcttaatgccgcgtcaaactcactacagttatgttgttcatagcttaaaattattagatttaattaaagatttttgtaaagaggactaatttactagtcctctttttctttttgtacttaaatcagatagaattaatatataaagtataaattaacgaggcagaggataaggattatgaaagaaatagtagtgcagggaatgaatggagaaatggtagtagagggagataagattactgtgaagcatacaggacctttatttttaggtaagcgtgaagtagtgttagatattcatagtctgcaagcagtagtttataaaaaagcacatctattaattaacggctttctaaaattagtacctaagggagataatcccatgctttatcaaactgccaccttacatcaaatggggaaagacgagctagccattattttacgtgcttttgaaaatacaaacccacaagatgcagaagatttttatacttatgttgttggtcgtttagatcaaattaaggcatctgaaaataatcatttataatctacagctgaaaagtagagcaaaataggaatttttcgttataataagaatagctgttaattttacaaggaagggcaaattaatgaaaaaagaagaattgcacgaaatgttgcacccaatgaaattaatcggacttggtggaaaccaagctctagcagaaagaattgcggctgctttggataagccattacttgaaactgctgttcaacactttagtgatggagaaattcaagtaaacattacagaaagtgttagaggttgtgatgtctacgtaattcaatctattcaagatcctgtgaatgaaaacttcatggaattaatgattgtattggatgctttacatcgtgcatctgctcactctgttaacgtagtaattccttatatggcatattctcgtcaagatactaagaatcgttcacgtgaaccaattactgcaaaattattggctaacttgcttcaattgactgatattgatgatttaattgcagttgatttacatgcatctcaaattcaaggtttctacaatatcccagttgatcacttacatgcgatgccaattttagctcaatacttcttagacaatggtattgcaagtaaggaaaatgatgatgtagtagttgtttctcctgatcactctggtgcaaaacttgtacgtacttttggttcatacttcgatgctccaattgctattgttgaccaacgcggtgcacgttatgacgcagaagctcatgatatgattggggatgttaaagacaagacagtcattatcgttgatgacttgattgatactggttctagaattgcttcttcaactagatcagtcttagctgccggtgctaagaaagtttatgttgctgcaactcacgcactactttctcaaaatgcgatcgatgtattgaacgaattgccagtagaacaaatcgtagtaactgatactattaagcataagaagtacccagatagaatggttcgtttatctgtagcacgtttacttgctaaaggtattgattatatttacaacgataagtcaattcaccaaatttttgatgaacaaaacagaattcaaggataattcacattaaaatttaatatttaagaaaagactgatcttggtttaaagtttagatcagtctttttgtgtttgaatattttatatttaattaagagtaaaatctaattaaatctatccttaaaattatgcctagccttccagacacaatttgacaattttctcatgcaagttataatacaaacaaataaaatagccaattaattgactatacaagaattttaatttcataaaaagaaatgtctctagtatatgttaaatactagaggcatttttgtctttaagggaggactataaaattggatgaaaaggagaagctaaagttaaaaagatcacttaagagtcgtcatgtaacaatgattgcaattggtggagccatcggtactggattatttttagggtctggtacagctattcaaagtgctggtccatcaattatcttatcttatttgatcgttggtattattagcttttttatgatgagggccttaggagaattaattttagcggatcctgagcaacactcatttattgaatcagtgaaaaaatatcttggaaatagaatggaatttgttgcaggctggacttactggctatgctggcttagtttagctatggctgacttaactgcaacgggaatttatttgaaatattggtttaaaaatctgcctcaatgggtcggaccattagtgattgtcattttgttaatgctagttaacatggttaatgtgggcctatttggagagcttgagagttggttttcaatgattaaagttttagctatcttagctttgatcattacgggactaattcttttaattatgcatactaaaatcgattctagaactgtttcactaagtaacttggtaaactatggtggctttttcccaacaggatcctggggctttctgaagtcatttcagatggtagtttttgcatttgtaggaattgaaattgtgggactgacagctggtgaaacagctaatcctgacaaagatattcccaaggcaataaatactttgccagttagaattggattgttttatgttggctcgatgattgctattatggcagtttatccatggaataagattgttactacaaccagtccttttgtacaagtttttggagcaattggtattccagcagctgccggaattttaaactttgttgttttaacagcagcaatgtcagcgacaaatagtgcaattttttcaactagtagatccttatatgctttatctcgaggcaataatgcacctaagagattcggcaagttaagtaaaaaggctgttccgaataatgccttaacattttcatctttgattctattcattgtagtaattcttaactatattatgccggctcaagtttttgatattatttctagtgtttcaacaattaactttattatggtttggataattattatgtggactcacttgaagtatcgagcagaaaataaggaacaacttggcaagtttagaatgcctggttttccaataacgagctggattacaataattttttatttagtaattttagtaatattagctttaattccagcaactagactaccattaattatttcaattatttttattttagctttagccttaagctatactcttttagagagaagaaaaagtaaatagtgagaagaaactgacggacaaagcgtcagttttttatataggattaattaaaaaaataaatcctaattcgttattagtaatagcacttggtataataattgtaattaacactatgaaaacgctatactgtataggaatagaataaatagtacgaggaaaaagatatggcaagacaaaaaaatttagtaagacggcatgaaatattacgcaatacttttatccttctgaaaaagagagggatggagaatgtatcgctgcaaatgattgcagataagtcggggatttctaaatcattgctccaatcttactacccacataaaaatttgttaattacagaaattgttaccaactttatgacggctgtgttaaagagtttaaatgcgactgactttaaagaattaaatacatattccaaaatgaaaatttttatttatttaattttagaacaaggtattcaagatgaaggagtagagcgtgtagttaaaagcattttaagtgatagtgattccttagatcgctggagtcaaattcttgacgattggcttagaaatgaaggagttaagcatgatcttggaagtgaccgtcaggttcagattggcttaaactttattgtcacagctggcggaagtttatacataaaacgtgctgaattggatttagatgcagatgaaatttctgatataatggtaaaaacttttatgtcaacatttctatcaatggatgagtctaagatagatcaaacaattgatgaggcaaaatctgctttacaaaaatatgaactagctactttgacccaaacaatcaatgagatgtttgacaattaatttttaaggaaggtctaggaaatggcagtacgcacacgcagtgagttacgtagaattgatcaagctcaaactgtgcatgataaaagatcctttggaattgcaatctttacaattgtggtcttattttttggcttagtaacttttatgaatccaatttttatgaagagtcaaaattgcaaaggaaagcaacggagtagtagctgaacgatatattaatcagaagtttgataatttcgctgcggcaattggtgctgatagaagtagtaataatagcactaataatcttcttaccgttgaacaaacaagaccaattgcagatgcgatgattgattataccttgggcatccatctatttagagctgaaaattcaagtttagctggtcaaattagaaaaattatattaacaaaaatagatgataattcttctatggaagccaaatcagtacaagaaaagctcagaaagaataaaaatagcagtctgtatgcaattataacgagttttggtttagcaaatactacattaatggcaaatatcgagatagtattattagttttgagtattttgataattatttttgtaggtatctttgcttatcagcaaattaaaagattgcaagaaattgtttcaactcgacgtttaattcatatggttgctgctggagggatgagagcagcaatttgcatgattgtgatctttggattactagcatttattccaacaatttttgatgttgaaggctttattttaaatattggttattttttagaaatagctagtggtattttcttggaattagtaattgttggtgtagttttatttgtaattagtactattacttggcaaattactagtgccaaataaaaatttaaaataaagatgcaaaaaaggtctcaggttttaacctgagacctttttctaagaaatggcgccggattggatgatcttaattgtattcaagtaagtgtaaagtagttagggtataaaataattgtaatttgcaacagccataatggctcttgtaagggtcctcaaccatttctcagtacttatttttacagtaattaagctttaaatcaagttgaaactattaattattcttaaataatataattagttactttataggctcttttagagtgttattttattaattaaattgcctaatccattgctttttaccaagataataccaagttgtatggttggttgtaatagattgaccgtaagcatagctttttctaggggtaacgtgattagaagttgttttttgtaaactaggataagggctagtgtaaatatgagtatcaagagaagcattatcaatatttactacgccagcagttagatctggattactgtaaacatagaaattatggaaccattgatcttcacctaaattgtagtaagagtaaccgtcttgataagaacgaccaaaaattatcgggttcatgcgacgatttttatttaaagaatcacgtaactcttctgcttgaagtaaaagagcagatttaatggttgtatttgaagaaggatcatcagcttgttttaagatattgcgggttgtttcatcagtagcctctttaatattttgagaggatgagatagtagatgaatttttaaccttgtttttagtcttagtgctatcttccgaaacttctaattttggttgattggctgctacttgattaaaaagcttaaagctgtactgatagacattagaaatatttacgttatattcatgtcctgagactaacttaatatctccaggaaaataggtcagaatagtgtcgaaataaccgtatcctttgttactaaagttattaacttttgttgcttgacttgtttgaccggtatcaagatcagtaattgtaattttgggagtaccagaaatagttttgtccgataaatagagggaccaggcgatattatttccctgaagtaattcgattggaaaaacgccactatttggataagcaactgtactttttgcagctgctttgtagccatcacttggataggcaacttgttgaacagaatagcgataattattttcaccataagcggcgccaatacctgtagttgtaagtcgactagataaaagccatgcgcggtgtcccgtgtctgaaccatcaagattataggtatcagttaataaatctgtgattacgtccccagcggattgattacttacgttaaagttaaggtttgaacttgcagagacgtttttggcaattgtccagtacgtctcattaatataatcaggtttagtttcactagggaggccatgttggttagtgaatgggttagctttgattgcagccataacgcttgccgtgatttgagcgttatcattatcggttttatttgttgaaatacttggtaagtcaaataaagctcggtaaaaattaatataatctaattgagaattgatataagaatttgtaacagaaccgggtgaaaagggagccgtgagatgaggagtgctggcataaagattatctgcattaaaattttctttaggtaaatttttatattgattttgaatttgatgaacttcttgaatttcatctttagtaaaggttgcagcctgtgcgttagtaactataacggtagaagtagttgtacttaacacaatagttgctaaaaaagtggctgcttttttggtaaaagtcataattactccttttagcgaatcatatagtagcatgatagtaatatatataacgtaattataaaaaaattgcattctttttagactttttttcgaaattgatgcattatagcgtcacgattgtttataataaggtttcgaggacaaaaaggagataaaaatatgactgacaaaattaaggtaggtttgatcttcggtggaaattcttcagaatatgaagtttctatcatgtctgcccacaacatttatgaagaaattgatactaataaatttgatgtttatccaatgtggattactaacgatggatacttagctgatgatgcagattctcgcaaagtattagataatcctaaaatggaagtagctaatcctcataaagtagctaatatttctaacattattgaattaaaagatcgtcctgaaattgacgtatttttcccaattgtacacggaaacttaggtgaagatggttgtttacaaggactatttagagttttagataagccatttgttggagacgatgttttagcagcagctgtaacgatggataaggaaatgactaagatcctcgctcaacgtgctggtgttcctgtagcaaaatggattgcagttaagcgttttgaatataacgatccagataacgagaagttagactatgaatacgtagctagccaattgggatcagatttatttgttaagccatcaaaccaaggctcttcagttggtgtaagtcatgttactaacgaaaaagaatataaggttgctttagctgaagcctttaaatacgatgataaggttttagttgaagaaactgttcatggtactgaagtagaaactgctgttttaggcaatgataaaccaatcgttgctggtgttggtcaaattattaacgcaaaagattcgttctatacctatgaaaataagtatgatgatgactcaacatcaactttagaaattcctgctaagcttcctgagggaattgttgaaacagttagaaagaatgccttaaaggtgttccaagcaactgaatgtagcggcttggctcgtatcgattcgatgcttcgtagtgaagataatgaagttgttctaacagaagtaaatgctcttcctggtttcactaatattagtatgtatcctaagttatttgaagaaattggaattccatacactgacttaattactaaattaattgattacgcaatggaacgctacgatcataagaagactttgttacataaacatgattaaacttagtttaagtaaagggagaatttaggatggcaagcgaccataattttgaagaacttgagtccccagcaaaaacggcagaagaacttcatattagcgtagcaacattaagaaagtattctttaatcgtggaaaaggttactggaaataaagattactatgaaagaaccaagcaaaagtctcgcttgtactcggcaaaggatattgaagatttaaaagcttttagagcattgtctaaaaatgcggatttaaccttgcaagaagcagctagacaaatctttgcagtaagcgataagaaaactgaagaagttaaaaaagcagcaaaaatgcaaaaatcagttgttactaatactgccactgttgatgctgatcaagtagtaaaacttttaacaatgctacaaaatactattgcaagtcagaataaagcaattgaagatttgcagaagcaggtagcgcgtgttgaagctcaaaataaaaaattaattgatcgttcacaccaattagctgagccggaatcagaagattctaaagaaaaagctaataataaagatcaggaagctgccaaagagattactgaagaacaaaaaagtgagcaagaggctcatgaagaaattttaagaaaagctagagagaacgaagaaaagcgtcgtaagcaacaggtagaagaaaatattcatcgtaccctagctcaaatgcaaattcgtcctaagaaaaaacaccattggtgggatcgctttttcaagtaaaataggatgccgaaatgcggcatcctatttttttattcatcatcagattcaataattaatgattcagctagtaatacgtcgttatacagacttaagatatacgttctatatttactctctttttgtccaatcatttctaaatattcacgctcaatagcaaatgctctaaaaaatgctaaacgctgtaaatactgttctgatttagttagattaggctgatcaattgtttttagcaacacacgcatgtattctcgtgttttaacaactcttttttgattgagtaaagtatagataacatggcgcttaactcttttaggtaggtacattttatggactgaaattagagctcgtttaaccatttcattacggatcttctccataacaatgtgtgcttcttcatcactaacttcatggggaagaataaattgaaatacaatcgtgggtacaagcatgctcaaaataattaaaactgcttcagacataataactagattgtagtttttagttcctaaaaagttagcactaattgttaaggctagagcaagagtaacagcaccatgaatacctccaagtgaaaatacagtactttctcgtcgatcatagcgaataactaaacgtccatagacataacgaacaagtaaatttgcgagataaacaatgaagccaacaagaatccacttggctaagtcaccattaaataatttatttcgggatattctgaccatcattagtcccaaaatgataaaaaccatactgttgaaaatatctgaaataagattttgcaagtctcgtcccatatggatttgtcttgaattaagaagtaaactttgctgagattctgcattatgtaataagccagcaaccacaacggcaataattcccgaaacatgtaaatcttctgctaacgcataaagtgctagcggggtaaggatataaattaaattctgtgcatttaaagaattaaatcgtgatctgatgagactttgacgaaaaataatgattatccaagcgactgcaaaacccaatactgctccacctaatgaagaaacaaagaagtcatgaatggtttgcccataattgatgtaaccattggcaaaccatagcaagctcatattcagtaaaatgattcccgaagcatcattaaaaagtgactcagcttttagggaggaagttacccgtctaggcattcgtaaaccattagttacggcttcacttgccgttgcgtccgttggagtactgatactaccaatgataaaggctagtggaagactaatgctagtgaataaataaatactgaatccactgattattaaggccagaagaaccataattacagttaatccgatgatttccttaattcttctaccaatattatgaattctagttttttgaccttcaaaaaacaaaagtggagctacgatcaattccataaaaatttctgaatcaaagctagcaacttggctatttaagaaggggataagcccaataattatcccaacgagcatgcttacatagttaacagataccttgtcaactgcttgagcaataataatactgattgccgctgcaattgctagggtaaaagttgaaatcataagttccattaaatctacctcagataaattactattttttaataattagtaaaaacttttaatgctactatagtagcatactaaccattgaattatttagggaaggcgaaaaagtgaagaagaatgcgaaaatttggcttagtttagtagtcttatttgtgggaatattttttactctaattacctatttttcaactgcttttgcaagtaagccaattgcggtcattactgatagtcaaataaaagatacactagttgataagacaaaagacaactatgaaaacaaagacgaggtacgtcaacaaaatttacatttaaaaattttatccggaaaatataaggggaagacattcttagttactaacacatattcgccgtcccaagcggtttcacaaaagtatcgaccacatcagcgtgtaattgtttcatttattaaaggtaaacctaaattagttgaaccaaaacgtgactgggttgttgttttaagtatgtttttgactattagtgtaattgttttaattacaggaaaacaggctagcttacttttaatttcaatgattttaaatagtatcattttttattttgtaattaagagtgatgtaaaggaaaatggaacaagaattttcttgatttatagtatcgcagcaattctgtttacttttgtatctctagtaatagtacaaggctttaatcaaaagatgctggtgactttaactgctactttgttaggagtttttgtttcttttggtatctttttatttagttatgagagtaactcatgagcgtggaattgattatgaggcagttgactatgctactcaagatcctcgagctttatttttatctcaaacaattctaggagttcttggcgcagtcatggatgaagcaactgatattgtttctagtctttatgcacttgcaaaacataaggccgacttaacatttaaagaactatttattagcggacgaactttagggcaagaaattatggggccactaataaatgtattggttttaatttttatggctgaagccctacctatgacaattttgtatctaagagataataatactttagtctatacctttaaatataccctttctttaggggtcatccagagtttaagctcggcgatcggaattgtactgacagtgatttttgcaactctatgtagtgctctctttttaagaaataaaaaagcagaggtggtagaaaaatgacaactttaactgctcttttattaattcttttgatattgatgattatagttggaggaaaaactggctttaagagttatctaagcgtcgttatcaatgcctgtttactgattttagttgcactgcttatttcttggggagtaaatattgtattagtcggagcaatatttattcctttgaaattactgacgattatttatttaggaacacatgattatactgtagccaaaaatgcctttttaactgccttatgtgtaagtgtaattgtaatgctgataattatcttgtttgaaaatttagcgcaaactcaaggctttggagaccaggcaggggaagaattaattggtttatcattaaatgtaggaattagtttttctcaaatcgcaattttagttgcaatcttttcaatgctaggtgcaattgcggaagccagtgttgcaatgagtgctggtttacttgagttaaagcggcatgaccctaacattactcaaaagcaattaatcgaaagcggaaatgaagttggtgcggatgtattagggaccgccatgaatacaatcttatttggtttatttggtagttttctcccaatatttatttggtatatgagactaaattattccttatttgaaattttaaatgataaactttttgtggatgagtttttaattattgtatattcgttcattggcgtgcttttaacggtaccattaactacaatattcttagcacatactttaacgaataaagaaaataaaaagtagagataaatagaggcacagtaagatgaaaatagataatttaacgttaacaaattttaatgggcgtgaatttaacattacttattatagtttgcaagataatccgcaacttctcctaaagaaaagaccactaatgttagtctttccaggtggtagttttgatcatttatcattaagagaaggagaaccagttgccctagcttatgcagctcatggatttgatgcagcaatagtgtcatataatttaactaccgatcctggcagaatttatcctgacgctgctttatctggtttaactgctgttgcatactttagagaaaacagtgagaagttaggtcttgctaaggataaaattacgacaattggtttttcagctggcggccatgttgttagttcgatgaatgtaatggcagaaagtcaaaagtggcagtctgaatatcattttgagcatgataaagtatcaccaaatgcgactattttaggttatccgttaattaatattaaagatattggttttcccttaccacctgatgctaaggaaaaaatgccaagtgcaaaagatttacttgatacagctgtcggggttactccccaaactcctcctacttttatttttcaggcagtagatgatccggttgtattaattgataatacgattgaatatattactgcattaagaaaaaatagggttcgctttgaggcccatttgtttaataagggtggacatggtttttctcttgctactcctgagttagctactaaagaacgtaaagctgatgcgcatcttgctcattggtttgaattgagccttgaatggttgaaagatagaagaatttacgtttagtttcacgtgaaacaaaaacatatatagaaaaagtccgaaaagatgacatgactatacattttcttttcggactttttaattttattcttttgccataaagaatagaacttcttttccagaggctaaattatcggaagttgccaaaattctaagtttaattgatttagcaactacatctcttaagccaattaccttgtttttagcatcatttggccaattaatttctttactaaagtcgctgaagttttctccgtctttggaaatagcaacttgaacacgtaaaacatgaccgatgcgatcacgtgaacgaggaacataaaccatgcggctgagtttataaatatggttgaaattaaaagttaagtctaaaggactatctttagtgatttgatctttagaaagccactcactagctaatttaagatcagttagattttcgactggtaaatcctcttcgctttctcccgtactagaaactgtaacatttgaaatggcataatccatctgatcacgctttgtatgggtgccaaagtattctgaccaatcagatactttattaccgaacttatttctaattctgaagcggtagcgtgtattaggttcaagctcatggaaagtaaaagtattaccgtcaatattagtatgaacaattccgttaacttcgatatcggccattatatttttatctgcgaaattagttggattagtccaggtaatagtaatgctctttgaagttgagcggtcagttaaaattgctgcacttcttggagaagccattgctgagtcaataatagcatgttgttctacttcgctaccataactaaagttttcaatcatcagttcgaacttattatcatgaatatcaacagcaggcatcttcactctaagagctggttgcagttgaccagtaaagtaaccaaattctttgcatggcatatagtcttgttggtagaagataccttcttcagctttgttaaagctatcaagatcgttatattcagttagtggaacaaattgatcgtttagtttaagagaaactttaccaggataacgatcagacataatagttaaattagtaatttgtttctcttcaagaccagtgtagctgccttcagttgggtagactgtaatatgaagatttgatccgctaacagagctagtgatttgtgtggtagctgcatgacccttttcataatcattagtttgattgtcatcttcatataaaatagctgagcttttactttgtgggtaaacaagggcacttcttaatgactcttgtaaaattgcaccgccgcgtacatatacaggaagatgccagagtgggtaatgcaacttatcgtaaattcgaccaccaattagttttttaccagtgaagaggtcaatccacattgttcgatgatcaggtaagtagaggttatcctttagggaagcgccacttggatcttctcgcccgttagtgattggagcgattagtaggttatttcctagcataaattcatgtttaacttggttagtatagttaactcgttcatgagggaaagctaagaagagtggtctaacaattggcattccatcttgggccgcgcgcgtaagagtatagagatatggagtgattttttctctaagtttaagataggcgcgagtaattctagtcatttttgcattaaatgcaaatggtgttttttggatattaccataattatcaattgaataaagaagtggagtaaagactttccattgtaagtcacggatatttacttgtgcattaccgccgccttcttttccatcaatagcacttcctacatttggctgcccagaaagagacatacttaaaaagctagcaatttcagtagcaatttgttcccattcaccaccaacaccttcatttgcagtagtagccaaagtttgaatagcactccagccattacttgccattgcccaaggacgattggtttgatttttatcaattagaggttcactagcgatagcaaagtcctgcattattttttcattaggaaaattagcaggatcagtcttgaactttaaaaaattagctggtgcatcagtaggcaaggatccatagaatcctatttttacattttgatcttttgcaaaatcaactaaattattcatttcatcttcgtttaagtcttgtttgctttcatagttaggaacaaaccaactaagtggaagatgatatgaattgtacctttcaatcattgcccgagcagaaaattggtactgttcttctccattaagagaggacttggccacaatatcatcattgctatgcgcaattttataagtattgccgtcttcaaatttaattgcactattttcttgaggtttagctgctgtccaacaagtatcaaggtagttaccaagataacccagaccgagtgcatattttggcaagaaaagaggagaccccgtaattttatagtactgacgcaatatttccgctggagaatctcctaaaagatagaaattatcaaaaataggagtttgatgggtaataactgctgtagtcccgtcatcactcttaaagttgtagataccatctttccatgtgtttctcaactctgcaaaaccagcatttgaccagaaaaatccttctggacaagcaacagcaccgggaccagttaaattagtatttttaatctcgataatttttcctttgtggctgaagcttccattttgcatcccgccaccgtagtagaattcgtttttgttctgacgtaagaattcgctagaataatcgctccccagttcaattggactactttgcatcatgcggtagcgatgtagttgatcatcgaaaatactgaagatagctggattcttttgtaagcgaagtgaaaactgaccgcttttaatggtgaaagtctcatcggttactaaaagctgagaatcttcaaatggacgcaaactaaagttacttgctgcgatagttaatgatggagttaaaggcttaaattctgctgctggatcaacgattaaacgaaagatacctttagcaataatgtatagacgcgctcttgttccatctgcaaattgcaaatcatagtagcgagtacccttagccacgtggactaaacgacttaaatgttgaggttgttgtttgttagtaatttcagacataattagttttcttctttaaattaaatttttcatttatgtatagttcatattataacgaaaaaatgagtttcgtgtttttttagatttgacataaagcgctttctggaatattctgtagaaggtggtactaaccagttaaagattggatggggttagaagatgaaaaaaccactttatcagcaagttatttcagatctcgaaaagaaaattaagactgaaatgaagccaaatgatcgattaccgagtgaacgacaacttttgaaagaatatggtgttagtcgaaatacgattcgattagcattaaatgatttagaagaacgtggcattatttatcgattgcatggaaaaggtacatttgtttcgacaatttatctagatcaaactaacttgggaagtatgtattcttttagtgagcaaatgtctgaagcaggccacaagccaacaacacaaaaccgcacattagaacttgtgacacctgaagaagacgttgcaaatcagcttaatttaaaagctggtgagaaagcatacaaattagttaggttacgtctagctgatggagtaccactaatgtatggagaaacttatttacctgaaaaaattttccctaatctaaaaatgtcagacctaaaggaaaacttatatacagtgatgaagcaaaaatataatgaacaaagtattcttgcttttgaagatgtacaagccgttaatttagacgaaaatgacagcaagattttaggtgttaagcctggggatgcaagtttgaagatttttagacgggcaatcaatgataaaaatgtgccgatcgagttcactatttctctcgctagaggagatagatttatttatcgatcacgtcaatataatcatttagtttaattattgaaaggaataggctcatgtttactaaaaccgacgcagaactaaaacagatgggtgcagatattactactagagaaattcaacaacagccttctttatggaaagaaacttttaagatatacaaagaaaagaaaacagaaatcgataattttttaactaaaattactaaaaaattcgataaggtaaaagtgatttttactggtgcaggaactagtgcttatgtgggtaatacagtaatgccttatttgagaaagcatggcgaccgtaccaagtatgactttgaagcaattgatacaactaaaattgtttcaacaccagaagattatcttgaagaggatacaccaacaattttggtttcttttgctcgtagcggtaattctcctgagtcagttgcaactgttgagcttgctaagcaattaattactaatttatatcaaattgctattacctgtgctccagaaggacatctggctcaagacttaaaggatgatccaaatggcttagttcttttaatgcctgctaagtcattagaccaaggttttgcaatgactggttcgttttcatgcatgagtttagccactttattagtttttgacactagaagtgatgctgaaaaagaagcaattgttaatgaaattgctgaaatgggccaaagtgtaattgaccgtgaagatgaaattcaaaaactagttgatattaattttgatcgaattacttatataggtagtggtgctttaggtggattagctgaagaagcacgacttaaaattttggaattaaccgccggaaaaatagcagccttatttgatacttcgatgggattgagacatggtcctaagtcatttttagataagaagacgattgtttttgactttgtttctaacaatacttatacgagaaaatatgatttggatattttggatgagattaaggctgatcaaattgttccattagtaatgggagtaggtcagcttaaaaaggggcaagactttgagggaaaattctttgcctttgctggaaaagaagtgcctgatgcatatttagccttaccagatattatgtttggacaaacaattgcattacttacttcaatcaaagtaggaaacactccagatactccgtccccaacaggcactgttaaccgtgttgttaaaggagtaacaattcacaaattcatcaaataaaattcaaattttgaaaacagtttcagactaaaatataaattaatttaaggagttaactattatgtcatattacatccatgcgggaaaattctttttagaaaatagaactgaaaagggaggttatcttgaggttcaagatgatggtaactttggtctatattatcgagaagatgaaaagccgagtcatggcttaattaaagaatatggcgatcaatggattgcccctggttatgtagatacacatattcatggtttgcttgatgaagatacgatgaagagtgactgggaaggcattgacaagatctcaaatggcttattacaagcaggtgtaactagctggttaccaacaactattactgctagtgacaaagaattaacagaaacttgtgaaaagtttgctgcacataagggtgaagaaactggtgctaaaattcaaggtttgcattttgaaggacctttctttactccaaagcatggtggagcagaaaatccaaagtacatgactgatccatcaattatgcttttgaaaaaatggcgtaaagcttcagatgacatgctaattaagatttcaatggcacctgaaagaaaaaatgctcgtcagtttgtacgtgagacagtaaaaatgggcttggtcgttgccttaggtcactcagattctaattttgaagacgctattgggtgtgttgaagctggtgctagcgtatttactcatacattcaacggaatgaatagtttatcacaacactcacctaatattattggtgctgctttttcttcacgtttaacaacagatgaattaatctgcgatggtcaccatgttgaagaaccagctgttcgtgctttggtaaatgcacgtggaccagaacatattgccttgattacagattgtatgcaagcaggtttaatgccagatggggactatgttttaggtgaattgccagtttatgttaaggatggaatggcacgtctaaaagaaactaataatttggcaggtagtattttgctcttaaaggatgcagttaagaatgtagttgattggaatgttgcaacacctgaagatgcagttatgatggcgagttatgtgccagctaagagttgtaatttacttgataagtgtggagtgattaagccagatcacccagctgattttgttgtattaaaccatgatatgactgtaagtgaaacttatttaaatggtgaatcacgttacaaagcttaaaagtttatatctttacaagtaactttagaaaatcttaaaaaagtggttgcaaccagttgactagcaaaacttaatatactaagattgaaaatgtagaaagcgtttacaaagtatttacaaaaaatggaggaatctctatgaatattgtgggagctagaattgatggacgacttgtccatggtcaagtagctaatctttggacaccaaaacttcaagctgatcgtattattgttgttgatgaagaagcagcaaaaagcgacattcaaaaaagtgggttaagaatggctacacctcttactactcgtcttagtgttttaccagcaaaggttgcagccgatcacttaattcatgatcgttatggtaatcagcgagtatttattgtcgctaaaaaaccagcagccttcttagatttaattaacttgggtcttaaacttgataccttgaatgtaggtaccatgtctcaaactgatactactaagcaagtgactaagcagatcaatgttgaggaaaaagacgttgaagactttaagaaaatagcagataagggtgtgaaaatcatagctcagttaactccaagcgatgattctcatgactttatgaaattaatgaacgaaaagattaaataggaggtttaattatggcttggtggcaaatattactacttaccctctatgctggatatgaaattcttgatgaattacaaatttattcatcattgaatacaccagttggagctggcttgattgctggtttaatcatgggtgacttaaaaaccggtttaattattggtggtgccatgcaacttacagttttaggtgttggtactttcggtggtgcttctaagattgatgcaactactggtacagttttagcaacagcattttctgtaagtattaaaggaatgagcccacaagtagctatttcttcaattgcggttcctgtagctgcaatcatggttcaattggacgttttggcaagatttgctaacacttattttgctcacagaattgatcacttaattgaagaaaacaattataagggaatcgagagaaacttcctttacggtgcgattccatgggctttatctcgtgcaatccctgtctttatcgctttagcatttggacgcggcttggttcaaacaattgctaactcattgaatggaaacttaaagtggttaggtactggtttaacagtagccggtgctgtccttcctgcagttggttttgctattttgcttcgttacttaccagttaagaagcacatcgcttacttaattatgggattcacatttactactttattctcagttttatttacaagcattcaaaccttaggtacaggtattcaagcagcaaataaatcatttactgcaactttcaatggcctaccaatgcttgcaatggctttgattggattagcattcgcaatcttacactacaaggatgaaattagtggcaaaggtggtagtggtaaaggcggaacaaaagaagccacaactactacagaatccactaatgtagcttcagagggggaaatcaccgatgatgaactctaaaccaacttataaattaacagataaagactttaatcaaattaacagacgttctctattcggtttccaactaggttggaactatgaaagaatgcagaatactggatatttattcttaatcttgccacaacttcgtaagatttatggtgataatactccagaattacaagaaatgatgaagacgcatgttcagttctttaacacttctaacttcttcaacactattattactggtattgacttagctattgaagaaaatgaaggtgttgaaggtaaagatactgttactggtttaaaggttggattaatgggaccttttgccgcaattggtgactcaatctttgctgcattgattccaacaatcttcggtgccttggctgcttctatggcttctcaaggaaacccagttggtgtatttatctggattgctgctcaaattgctatctgtttcttcagatggaagcaactacggtttgcttatgataaaggagtaactcttgttactgatatgagagaccgtttgaatgctttaactgatgctgctacagtacttggtgtatttatggttggtgctttagtagctacgatggttaacgttaagtttgcttgggtaccacaaattggtaaagttaccatggacatccaaaacaacttagatatgatcattcctaaactattgcctgctttgattgttggctttgtttactggttacttggaaagaagaagatgacttcaactaaggctatcttaattgttttagttctttcagttattcttggcggtgttggtgttcttgctaagatttagcagtaaattaaaggaaaaatattatgacaaaagaattagtgctaatcagtcatggtaagatggctgaagaagttaaaaaaagtgcagaattgattatgggtcctcaagaacatattcatgtagtatgtttacttccagaagaaggaccagaagattttgaaaagaagtttcaagctaccattaacggcattccggaagaagatttaacagtatttgctgatttaatgggtggcacaccagctaacacagttagtcgcttgattatgagtggtcaagatattcacctaattgcagggatgaatctggcaatggtaattgattggctcaatagtcaaatgattggtaatgatgcagattctgtggctgctggtaaagcagggattgtagatattaatcaaatgcttgctagcattaagaaataaatacattaaagaaataaagaatggctcacgttggtaaaacttacgcgagccatttcttttttattgatgcttaatctttaggaagttttaggataagctaatacgtatgaagtataagtaagataaatactagtaaagattaaagaagtgaaaaaatgagaaaattttgttcaaaatgtggagcacccttaaaacctgatgatcaattttgctcaatatgtggtactcctgttgatggtaacagtaaacacgaactggaaaaaataaattctattaagcaaagaccacaagtcaaaagaagtgaaattcgtaattctaagagaaatttcaaaacaagaaatattattatcggagtagttatcgctattgtagtgcttgttgctggagggtgggcaatttatcaacatggccgctcttcagcagaaagcaaaataattggtggtaatggcagactaactactgctgaaataaaaaagatgccaaataaacaactagctgcttgggcaattctctacgcagataaaaaatatggtaaaaaatggggagaagcagcagatgaattaagaagtggacatttaacaattaagagttactcaagccataaatttggcgactacgaaattagtgctacaaatggtagtactttgtatgctgtaaataaccaagtaggatatcttatttctaaagataaaaaagagataacttatgtcggaaataagtcgaattatagtaatagagatgttttagaacaaatttatccagtagttaaatctgaaaatactgaagagaatgtaagtaattggaataataatttaacaattgttaagggaaaagatcgtactgcctcttcaagtacaaaaaaatttacgactgaagaaaagaaagacactaaggcaactaaattatggtcggatgagcagagagacaggttaattagttatatggatgaatttggtgataaaatgcaccaaccatattcgcattatactggtagcggaagtataacaactgcagctggtcaagaatacccgagttttctatcagaaggaaaattcaaattgagttcaggtgataaggatagtcgtgatcctgaagatatggatagtattaacctcaagtggaatccagatgttactgataaagacaatgatagtaatacatacaatgtagttgcaatctttaactataatggaaaaagtgctgaacagcacattacttatcttttttgcttttaccatggagaaccagtagctcttgttgatcaaacaactaatggagaatacaccgtggttcatgcaactgccaaccatgacttaacttctaactttgaagaaattgctaataatgattagaaaaagaaaaatctggtagaaaccatctaccagatttttttatttattaatatacagcaccatcatagaagttgtatcttggacggttgaaatcaaatgtagctaattcactcattttaattacgttgtcagcaacgccccaactcattaaattgattgattcaccatataattcatcaggaattacaagtaaaacatactttccttgagacatagcgtaacctaattccatccctaaaccaacgtcttcttctttaggaacataaacgccaagcataacgtcactagttttaataccaactaagtcaccattataagttgcttgtgcccattctttatcatgtaagtattcgggatgttcgtcaacacgaatatctttatattgattttgaagaggaacatagctgttttctaaatcaatagtaggattagcattgagagcgctcattgcatctttgtaagccttgttttgagtttcagtaaaccaaccagccaccaaaataaactgttttttgttttgtcatggaaaaacctttctttcttattggtggaatattttttacattaactaactttaacaaaatttgctcaaaagaaacacccacttttgtgtttttgaaatcggttttatataatgaaactagaaatttttgcttaggaaaggcggaacctactacgaatactaaaaaaagtcttttcgatccgcaagctgtctttgtaacagacttaactgatcgaaacgagatattcaagaccgtttctcaaaaattatatgacttaggctatgttaaagaagattttttaggcgatattattgaacgtgaagataagtatccaactggaatttcaatgagacctttatctagagaacttccagatgttgcagttcctcatactgaaggggattatgttagcgcacaattaattgtaccgattgctcttagaaattcagcaacttttaataatatggttaatccaagcgaagcattggaagttaagttcttatttttgattttgaataatgatccagatatgcattcaactattttggctaaaattatggactttctagctggaacttcagttgatgatttaaatgaattatttaattcagattcaaatgaagaaatttatgattttttagagaataattttgaaattgaaaaataaaaagaagctgctttgcagcttctttttgtctccagattaaattattaaacttccggataatcagtacttgaaaatgaaagtgaaaagtaatcacaccgtttatagccaataactagttcaactacttcacctgtagtagataaaatagtttttttgacttgtcgtacaacgggataatctttagctatttttagttgcttactaatttcgctatcagcttttacaattgtgtctgtttcagtaaagggctcatcaaatagatacaattgcttatcgctttgcaaggtttcatagatactatgataattattcggatctttagctaaatttcgattaataaatttagctggtataaatgaacggtgcaccataaatggtgtgtcaccaattaaacgtaaacgttcaatatagtagtaactatcatatttgggtaagccgagtttttttaagatttcgctctgcttttcctcttggagtttcaaaactttaactgtatcttcttcttgtttgtttgagaagacttcattatcactaagacgaactaatttatcttttcttgatcgtgaaataaaagtgccttttccttgatgacgaactaaatatcctgccttgacaagatctttcacagctcggataacagtaattgaagaaacattaaacttatcttttaattgagcttcactataaaatttatctccatatttaaatttgccagagataatttcttgctttagctcgttttcaatttgtaaatattttggaatatccataatctatattaatcctcaagatagattctcctaagatccatgatatcactgcttgagagcttcatggtagaacgaaggtattcgttgatgccaccgtattgctggtttaggacgtgtacagcatggtctaagtattctggatagactgactgaatatctttaatagactgcaatacacgcttgctagaaccgtcagcggctgcttgcttaagcatggcatcaacaaaactttttgttgtgatattggttagagtatagtcatatttgatagtagtaaaaggtacacctaatgctgataagatcaataaagctccaaatcctgtccgatcttttccggcagtacagtggaaaagaagagcattcttgtctttatcatttgtaagcaaaaggtcaaagaatttacggtaagctttttgagcagtctgtccattgatcatgtcttcataggcaaagaacatatgcttaaagccaaattcaggatctttttcggcattctcttctaaagcaaagatccccttagatgcattagttaaatcatcactaaaaactggatcaaaaacatatttagcgccttctggaacacgatcaggatgatcatttttttctttttctgttctaaagtcaacgtcatacttaacgccatgcttttgcaataattctaagtctgatgaagaaagatcagctaaattaccagttctaagtaatttattatatttaattgtttgaccggatacagtcttatagcctccaagttcgcggaaattgcgaccattttggatgccaattaatttcgtctcataattttcgctcattagtatttttcctcactatagttatttaaatacagtattattactttaacatattttttcttagatattttatttttctcagatctataaaaagaaaacaaacttattaattggtataattaatggtaaaattacaatgtaaagatacaaattccatgcggagatgattacttatggtagaagattatgacaacattttagttcctgttgatggttctgaaactgcagagcgtgcgtttgataaagcagtaaagattgctcttgataacaatgctcatctggatgtattgaatgttattgatactcgtcaatttatgggggaaatgcaggatactttgatttctggggataccatttatcaaatgacgcaggattccgaagagtatttaaagagtctaaaagaatgggctaaggaacactttaattttactgatgtttcttaccatattcgttatggctcccctaagagaattattgctgttgattttattaaagatcaccacaacgatttaattattatgggtgcaactggtatgaacgcagttgaaagaatgttaatgggtagtgttactgcttatgttaaccaacatgctttatcagatgtgttaattgttaagactgatcttgataataacaaggttgcaaaacctaagaaaaagtacttttaaaaaaagaacattatgaaattcactctatcagtaatgatagagtgtttttttataaagtggatcgatccaattcaataaattaatatttactagcgcttacattaaaataatagtacccaagtacgaatatttttgatatgatacttaagaacgaacgttagtactagggaaagggagaacgataatggtgaatttcgattacaacattataaaatgtaaccaagattcagtggctcgttcttgggctgattccttcggtggatcagtcttcattagtgttggcgctttcgttgtttttttagcgacttttctggctcaatgtgattagctctttttgtcagctcatcatgttgggtctttttttgtatttgtcatttaatgttttttcattaggaggaaatgatgaaaaagttcaaaaaagtcttagtaggcctttttgcaattttacttgctgttgttgcaactgcttgttctaacaaatcaaacagttcaaaggatggttatacaccaaaatcattaactatccaatttgtacctagtcaagctgctaataagcttgaagctcgtgctaagcctttagaaaaaatgctttctaaaaagcttggaatcccagttcatgtttcaatgtcaactgattacaacacagttgttgaagctatgaaatctaaaaaagttgatgttggtttcttaccacctgatggttatgtattagctcataaacaaggagctgctgacgttttactccaatctcaacgttacggcgttaagcaacctggtggtaaggcaactaataaattagttgattactatagagcagaaattcttgttaagaagggttctaaaattaaatcttggaaggatctaaaaggcaagagtatttcagttcaaaacccaacttcttcagcaggttatgttttcccaattgctgaacttggagaaaaaggtttggatgtgccaaaggattgtaagttagttactgttactggccaagaccaagcagttttgaatgtattaaatggtgatactgacgcagcatttgtgtttgaagatgctcgtaacactgttaaaaaagacaatcctaagattatggaccaagttgtcccaatttacttcactaagccaattcctaacgatactatttctgttagaagtgatatgtctaagtccttccaaaagaaacttgcaaaggcatttattgaagttggtgaatctaaagaaggtaagaagattatcgaatcaatttatagtcacgaaggctacactaagtctaaggacagcaacttcgatattgttcgtaagtatgacaagattattgccaaggacaagaaatagtcaattaaataaagcttagttagtaaaagataattgtctctaaaagacgattatctttttatgcactgtagtcaatttaaataatgttaaggagatttttaaattaaatggcagctactaatcagccgatgattcaactaaaaaacgttagtaaaatttatgataacggaacagttggtttaaaggatattaacttaaatattgataagggagaatttatagtagtagtaggtctatctggtgcaggtaagtctactttacttcgttcaattaaccgtctacaagatgtctcagaaggagatattataattgatggtaaatcaattacttctgctaagggtaaagacttacgcgaaattcgccgtgatattggaatgattttccaaagctttaacttggttaaacgttcaagtgttttacgcaatgttttaactggtcgagtaggctactatccaacttggaaaacaacttttaacctatttactaaggaagataagcaaaaagcatacgaagcgctccaacgtgttgatttagcagataaagtttatactcgtgcggatcaactttccggtggacaacagcaacgtgttgctattgcccgtgtgcttactcaaaatcctaagattattttagctgatgaaccaacagcttcacttgatcctcaaacttcacgtcgagttatgcatgatttgaagatgcttaatgaagaatacgggatgactgtagttgctaaccttcacagcgtagaacttgctaaggaatttggagatcgagtaatcggtgttcgtgcaggtcaaattgtttatgatggtaagatgagtgaaacttctcaagctgtctttgacgatatttacaatggtggaaatggcaagaaaggggaagaagatgcctaaatctaaggaacagcatttagctgaattgcctaaaaagaaattcaaaattatgaaccttgtatgggtcgtaattatggttttaggtctctttctttcagtagatgtaacaaatacccatattagtgttttatttaataactttagtcaattcactgatatttttgttcaaatgtgtcaccccgattggggatatgccgctacggcagttccacttttaattgaaacaattaaaatggcaattttaggaactgtaatgggatcagccatcgcctttgtttattctcttttaatcgctagaaatattgttaagaataaggccgttactggaattctaagaataattatgaatattgttagaactattccagacctactcttaggtgcaatctttgttgccgttgtaggtattggtccagttgccggtgttctagccttaactgtatttacatttggtgtggttgttaaattattctatgaagcaattgaaacaattgacccaggtccaatcgaagctttaacagccgttggtgcaaataaactacaaattattcattttgctgtgatgccacaaatacttacttactttatttcttatgttttatatgcatttgaaattaatgtcagagcttcaacagttcttggatatattggtgccggtggtattggtttgtacttacaacaaactcttcaagtctttgactatgctaagaccggtatgattatcttagttattatcgttgtcgtagttattatcgactacatttctactaaatctcgggaggcgttgatgaaataatggatactacaatgaaaaaattacctcctaaaccagtggatactaagaagaaggttcaacactggacaattgccattgttactatcattttaattatttggtcatttgtaggaatggattttggcggaataaaagcaagtgcaggtcaaatcgcaggagctattgttgccggaatttttcatccagattggtcatatgtatataacggaagtggtgaagatttaatttctcaattatgggaaacaatctgtattgctttcttgggtacttttatttctgcaattatttctttacctttcgccttttgggcagctaatactcgtcataagaaatggtatacatcccgttcaggaaaagttgtattagccgttattcgttcattcccagaaattgttttagctttgatgtttattaaggcagtaggaccaggttctgcagccggtgtactagctttaggtttccactcagttggtatgcttgctaaattgttttcagaagcaattgaaaaccttgaagaaggtgcaaatgaagccgttactgcagctggtggatctaagtttaacattattatgtttgctactatgcctaacttaatgccagccttgatttctaatactttgtatcgatttgatgtttcaattcgttcagcatctattctaggtttagttggtgctggtggtattggttatccattaatcattgccttgcaataccgtcaatggaatcgtgttggtgtaattctagttggtattattgtcatggttgttgttattgactggatttctggctggattcgaaagaaattagtttaattaattagtaaaacatgtagtttatctaaactacatgtttttattttggtaaattataaatttttttgtaatatctacctataatatggataagtacaggaaaaaaaagaacttttttgttataatggaagttgtatttcaaggaggacaatatggataatttaactaccatgacattggctgacgatatggctttatcacaagaaaagattatcaacggccaacaagacctgaataccaagagaatttataatgaaattaatagtttggatattcttgataagccaatcgaagaatactttgatatgactcaagatgaatactacaatagtgaatctgatggtaaattaactttactacatttagataaaccattacgtgaattaaatgatcgtattttaactaaccacgtagatggatatgtagatcaagacgagattaatttaacctataatcatgaggatccattgcaagatggtagctatgatcgtgctactgatttacatgtacttttatatagtttaaaagtcattggcgctgtgagagctattgctccgaatgatttgaaaaaggttttgtctaaagatgcggttttatcattgggtcttgccgcaaatgctttggcaaataattaaccccaaggccaactaaaggcctttttttgtgtgatgagtggggaagagtatcatgaaaattatcaagaaaaccaagggtatgattgataaattttccggtgttacccggaagatgatgcgaaagaaaagtaatattccatttgatggaatgcaaaagtatatgactgttggtgagtataacgttggagcgcctgaaggaactccacatggtgaagaatataagcttattgtttataaagatactgacaatgtcttacaccaagctttacgttcgattaatgcgtctgatctagcaccagcttatgttcggaagtttgataaaaggctaaatcgttatactgcatttgttaataagcagacaggacgtcgttatatcgttgaagatcaactagatcagttagtagattatgtaaaaaagcatagccgagatggctataactcaattaatatcggtgttttaaccgatacacactataaagatgctgacagtattgatttttatgggcataacggacttcgtcatgttaaagagtttaattatcttgaagataaagatgttttagatttaaaggctcatttaggtgattggatggatggatccgatccaggattagttggcgaagcagagttgatatctttgtctagaacgtttagatctaaaaaaactaactttgctgtcatcaaaggtaatcacgatgaaaatgataaatttgatgagcaccatgatctgagagctagttttccggaaaatgaatttgaagatataatgtggccaagtatgtatgcgcaagatggtattcactatatcacgcgcaagcacggggttgcatattttgataaagatgatgtcagaatcattacggtcaatacatctgatttaccttatgagctagatgagcaaggtaagaaaaaatacgatactaaacttgctttagcgattcgtgaagatcagatgcaagaaattatcgaaattcttgaaaattcaaatggtaaaacaattattttcatgagtcatgcaaatcctattactcgcaagggaacgaatgccttgaaatttaatgggcgttctctacatgaattaatggttgccttcaatcaacgtgaaaaaggctatcttaattcaagggatgttcctcctgaatttaccctagctaatagctttgatttcacaaagataaaaaatgcaaaaatagttgcatatttatgtggacaccgtcatactgaagaccaatatcgcattaacggtatacaatatatattttttaattgctcggctctcatgggcccaaaccatgcgcttactacgcaatacaataagcgctggaatagacagatggatcatgctaatgaagcagctggatatatagtaaatgttgatgttcaaagacatttattacaagtatttggatacggagctgcttctaagagacgattctatcgaatttagtttttgaaatgtaaatagcttataataagactactgtttattttgaggtgaaagttacttatgtgtggaatttgtgcgttttttgatcctgaattaaaggataaagactgtgctattcaaggaatgatggatacaattaaacaccgtggtccatcttccgatggaaaatatactaatgataaggtggctttaggttttagacgtttgtcaattattgaccttcgtggtggaagtcaaccaatttttaatgaagataaaagtagagcaattatttttaatggggaaatttataattttaaaccattaagaaaagaattaattgatgcaggtcatacctttactactaaggctgatactgaagttttacttcacggctatgaagaatggggaatggatggcttattgaagaaagttcgtggtatgtttgcttttgtaatttgggatgacaataccaagactttatatggtgctcgtgacttcttcggaattaagccaatgtactactcagaccaaaatggtaagttaattgttggtagtgaattgaagagcttcttagcttacccaggctttaaaaaggaattaaatactgaagcagttaagccatacttaatgaaccaatataatgacttaaaggaaactttctttaaaggtgtttaccgcttcccagcaggtcactggttcgaatataaagatggcaaaatgaagactcatcaatactgggatgctaagtatgttgaaaatagcttaagttttgaagaaaccttagacaaaatcaatgaagacttaaaagaaactgttgatttatacagaaatgcggacgtaccagttggtgcattcttgtctgaaggtattgattcttcttacttaactagtttacttgatcctgaagatgtcttctcagtttcttttgatgattctacatataatgaagcatcaaaagctaaggcactttctgacttacacggctggaaattctttgcagataaagttgatgcagatgaagcaatgcgcgacttcccagaaatgcaatatcacatggacgaaccagatgctaacccatctattattccattatggtacttgtgtaaattagctagaaagcatgttactgttgcactttctggtgaaggtgctgatgaattatttgcaggctacgttaactatggaatgcatacccataatgatgtaattaaggtctttactgctggccttaagaaattacctaagaaaagtcgtgttcgtttagctcataagattaagaagatgcctaacttcccaggtaaagtacatatgtacactaacttggcagagccaagtgaattttatgttggacaatctgtcatttatgatatggactatccaactatctttacttctaaagatgctaatggtattttgcgtgataaatacaagaatgatctgacagttaacggtatttatcaagaagactttaagaaagttaaaaatattgatgaagttaagcaaatgcaatatattgatcttcaccactttatgcttaatgatattgagcaaaaagcagataagatctcaatggctcactctctagaattacgtgtgccatatcttgataagaagattgcagaacttgctaactcaattccaactaaatatttagttaaccggcacgatactaaatatgctcttcgtaaagcatctgagaaggtcttaccagaagaatgggctcaaagacctaagcttggtttcccaactccaattaagcaatggcttaaggaaccaagattttacaaacaagttagagcattgtttactgaagactttgtagatgacatttttgaccaaaagaagattgttaaattgcttgatgataactacaagggcgatggttcagctcgtcgtcaaatttgggctatttacactttcttagtttggtataaattattctttgttgattatgatgaaactgttaagaagtatcaacatgttcaaccagaagtagcagaattaatcgaaagtggcagacttgtttaattaaagttagagagaagtacggatacaaaatggtacaagcaaaatttactcctattttactcggtagtgacatcaatgtttacggaatggctcgctccttcaacgaagcttatggaattaaggttcaagcttgggctgctagtcaattagcagcaacgcgctattctaaaattgttgacgtagaagttcatgaaggctttgaagaagatccaggctttatgaacgttatgaagcaaaagattgaagaatacaagaatcatccagaaccagttattttaattgcttgtggagatggatacgcagaattattggctaagcataagggtgagttgaaggatacttttgttgttccttacattgattatgacttgctagagaagctaatttctaaagaaggtttctacgaaattgctgaaaaatatggtcttccatatccacatactaagattgtgactatggatgactataaggctgaaaattatttgaatttaccatttgattatccagttgaattgaagccagaagatccagtttcatggttgaattgtcaatttgaaggccgtaaaaaagcctttactattcacgatgaggcagaattagtagatatcgttggtaaaatctataccaatggttatactgaagacttgattttacaagatttcattccaggcgatgattctaacatgcgtgttcttaatgcttatgttgataaagatcacaaggttaagatgatgtgcttaggtcacccacttcttgaagacccaactcctcaatctatcggtaattacatggcaattttgccagccttcagtcaaaagctctacgatactgttcaatcattccttgaaaaattgaactatactggtatggctaactttgacattaagtacgatccaagagatggagaatacaaattctttgagatcaacctccgtcaaggtcgttcaagtttctatgtaactttaaatggctataacttagctaagtggtatgtagatgattatgttgaagataatttgaaagataagccaacagtttatggaaataaagacggtgctaactatatgttgtggcttggtgttccaaagaagatctttaaggaatatgcttacgacaacggttcaaaacgcctagctgaaaagttaattgacgagggtcactatggtacaactgtcttctatgataaagatcgtagcttaaaacgttggttattgatgcactacatgttccataactactatgctagatataagaagtactaccaagtaaataagggacaatattttgaagaagaagctaaaaaattagaaaagcaagctcttcgtgatggtcaacaagaaaaccatgagaatgaaatttaattagaaaagtactgctgagaattttttactctcagcagtatttttttgactactttactaattatagaaaattttgaaaatgagcctctctcttgctagacgtgacttttgcttaatacaatatatatgatccaaaatgtcaatacctacaatatcatgtagtttctgatagaatagaaccatagatattgtgaaagaagagaataaccatgttacaacaagatgctcaaattaaatcaattactcaaatgacactgccagaaacagctattaaaagagacggcagcatctatccttttgctctttacaaaattgaaatggttttagatagcttgcatctgactgaacatgaagcagatattttacctgctatccttcaaaaattaaatggtgcaaagcagacttctactgagaaaatagcagatgcatttgttcaaacattaatcgaactcggctttagtgatgaagcaaatgcttatgttgattaccgtagagaagatgaagctaattttaagaagcaaactgagactactaaccgtctgggacgtttaattcaccatgatccaacaattgttaatgaaaatgctaataaagattcacgtgttttttcaactcagcgtgatttaacagctggtgtagttggtaaaacaattggtttaacgatgatgccagaacatattgctaaggcacacttgcgtggtgatattcactggcatgacttagattacacaccgctcagtcctctaactaactgttgtttgattgactttaaagaaatgctaggtcatggctttacaattggaaatgcaaatattgaatctcctcattcaatcgaaacagccactgctcaaatgtctcaaattattgctaatgttgcttctagtcaatatggaggctgttctgccgacagagtagatgaagttttggctccatatgctgaaaagaattatcacaagaatattaaagaagctagcgaattttttgacgatgaagaaaagatcaaggcttttgcagttaagcgaacaaaaaaggatatctatgatgctatgcaagctcttgaatatgaaattaatactctattttcaagtcaagggcaaacaccattcactactttaggttttggactaggaacatcttggattgaacgtgaaatccaaaaagcaatcttaaagattagaattgagggtttaggaaaagataagagaacagctatctttcctaagttagtctttacgctaaagaagggacttaacttacatcctggagatccaaactatgatatcaaggaattagctttggaatgttctactaagcgtatgtatccagatattgttagttatgacatgattaagaaaattactggatcatttaaagctccaatgggttgtcgttccttcttacaagggtggaaagatccagaaactggtaaagaagtaaattctggtcgtatgaacttaggtgttgttactttaaacctacctagaattgccatggaatcaaagggagacaaagatttattctggcaaatttttagagaaaaagtccaaacagcacatgaagctttacaaattaaggctaaacgttgtactgatgctgtacctgataatgctccaattctttatgaatatggtgcttttggtaaaagactaaatgcagaagataatgtaaatgatcttttcaaaaatggacgctgtacagtttccttaggctatattggactttatgaagttggtacagtcttttatggtcctaattgggaacataatgaggaagcgcaccaatttactattaatattgttaaagaacttcacgattactgcgctaaatgggaaaaagaagatccaaatcactatcactacagtgtatattcaactccaagtgaaagtttgactgatagattttgtcgcctggatactaaaaaattcggtaaggttaaagatattactgataaggaatactacactaattccttccactacgatgtaagaaagcatccaactccatttgaaaaattagcttttgaagctccttatccattttatgctgcaggtggatttattcattattgtgaatatccaaaccttaagcaaaatcctaaggcactagaggctgtttgggattgggcttatgataaagtaggatacttaggaaccaacactccaattgaccaatgctacaagtgtggttttaagggtgaatttaaggcaaccgctaaaggctttgaatgtccacaatgtggaaatcatgatccagaaacttgtgactgtgtaaagcgtacgtgtggctatctaggcaatcctttgaaacgtccaatggttcatggtcgtcatgaagaaattgtccaccgtgtaaagcacttgaatatgggaatggaagaaaagatggctaaggatgaagttagaaagaatgacgaatactgatgccagagaaagataagaataatcaagaaggtcctgatgttcgaggaaatttaattaaggttaatgttggtggagatactatttttgttgattctaatcaatataagccgcaagttgaacatgctaaaaaattaaaacaacaacatagaaaaccgaagaatcctaagccccaagaatggaagtcagaagaatactctaagcataaaattgctgactataagccatttaactttgttgatggtgaaggggttagatgcagcttatatgtgagtggatgcttgtttgactgtcccggttgttataatttagcagcccaaaattttaattatggacgtccttatactcaagaattggaagataaaattattgaagatatgtctcaatcctatgtacaggggctaactttattaggcggtgaaccttttttaaatacttgggtatgcttgaaattaattaaccgggtgcgtaaggaatttggacatagtaaagatatttggtcttggtcaggctatacctgggatgagcttcaaaaagaaactcctgataagaaagaaatgctttcaaagattgatattttagttgatggacgtttcatggatgatttgaaagatctgacactacaatttcgtggttcaagtaaccagcgaattattgatgttcaaaaatcaatcaaggctaataaggttgttatttgggataaactggttagataaatttgatagaataagggaaacaagagagtttctcttatttttttaggtgaaaagatgcaagaaaagaatttggaattagtagataaaattatgaccgctcttcaaggtgtcgaagatccagagttgttgattgacgtagtcaatctaggcttgatttatggaatcgatattgaaggagatcatgcaacaattaagatgaccctaactattgtgggatgtcccttatctacatatctacaaaacgcaattgaaaaagcagttttgtctgtgccagaaataaataagtgtgatataaagttagtttggtatccagtttggaatccagagcgtatgacagtagctgctaagaaacaattagggatacttgataatgagcaggcccttgaccaagaaaatgaaattgaagagacagaagaaaaagagaagataattgatttttctgttccaataaaaaagctggctgaagaatatccagattttattcaaattatgtatgactgcggctttacaagaattaaaatcccaggtttgttgtctactgtaggaagagtaatgacgattccacttggtgcgcaggctatgaagattgacttagataaagtaaagcaggcgttcgaggataaaggctacaaggtgattgattaatgaaagaactagataaagaacgacaacaagctattttaaaaattttaaattttattcaagacggtggagagcttgaagaagcaaagaaaatgtttcaagctgcctttgatcaagttgatgtagccgaaattactgcggcagaaagagaattaattgcacaaggtcttgatccaagaaaaattcaatatttatgcaatgttcatgctgatgtttttaagggtaatattaaggaaaataaggagaattctgagtttgaaaaaccaggtcatcctgttcatacattcaagttagagaatattgttcttaagtcattggtaaatgacgccttattaccagaccttgctaagtgggaaaagggagataagagtgcactctcaaagttaaggcaggagttaaaagacctagccaaaattcattatcattatgctcgtaaagaaacttccatgtttcccattatgactaaatatggaattactgcaccaccgaaagttatgtggggcgttgatgataaaatccgaaaacttattggtcaagctaatttacttattagtcaaaaagatattaataaggctgaagtgtctaaggcaataaaagagacagcacatgaagttcttgaaatgatttttaaggaagaagaaatcatgttgccaatgattgatgaagttgctagtgaagaagactggggtaatgtcaaaaatgaggaagagcagattggctataccttgattcaaaaaccaatgaattggaaacctaaggaaaagccgaaaagtgatgggcctatttctatcgataaattaagtagcttagcactaaattttgcagaagggagcttaaatttagaacaattatctgcaattttggatttattgccttttgcattaacttttattgatgaaaatgataaagtagcttattttggcggaggcgccaatatttttccccattctaaaaatgcactcggcaatagtgtttattcttgtcatttacctgagagcgtaccacgagttaaaaagatttttgacgattttcaccaagggaaaaaagataagtatgagttttggtttaagccaagacatatgggacgatacttatacttacagtattttgctgtgagaaaagataataaatatttgggctgtttagaggttgcccaagatgttactgatattagaaattggaagaatgaaaagaaataattagaagactctacctttgggcggagtcttttttacgctcgtgcaaaaatgtttattaattgctagactgaatgtaagaatatagaagaaaagggtgagagagttgcataataagggaaatattcaaccagatgatgagataaagttacattggcttcttttaggtgagttatttacctggattggagccagttttatttggccattaacttcagtttatttgaataaaagactccatgtttctttagctatgattggaatagtacttttatttaattgtttagctaatatgcttggttcatttattgctggctgggcatatgatcatttcaatccatactatttaattatcgccggcgctggtttagatgccttagtactatttgggatggctgctaatcatacttggccaatttattgggtttggatgactttgaccggtctcctgggcggctggaacggtgcgttaattaattcaattgcaactagcatcaagtctaagcccggtcgatatgtctttaatacaatttattttgcacaaaatcttggtgtggtattagggacattaattgtaggttatatctatgattattcagttacaattttatttataattgcggccagtctttttgtgattgtaagtataaatgcagtaattaattatcgaccgattattaagtttcatttagaaagaaaagctcagcaaaataaagatagtaaaaataaggcaactccgatgcctgctgccaatctaaagctgactgttggctttttcactaccttagctgtaatttggttaatgtatatgaactgggaatctaacctttcagtttatatggtttctttgggaataccttttcatttatatagtttattgtggacaattaacgcaggtattattgtaattgttcaagcatttttaagtcgtttccctaacacatttaagaacttgtttcatcaagtagtatttggggttactatgtttgctatttcttttgtaaccttaatctttgcaaaagactatgctcactttgtattttcaatggttactttaacgcttggtgaatcaacagcaatgccggcgatgcccgcatatgtaaatgacttgtcacctatcgatagtaaaggtaaatatcaaggcttaacaatttcaacgtcggctgttgggagggcatttggccctttatttggaggcttagttattgataagtttggctatatcaatttctttattgttgccgcatttggtatttttatgatgttagccattattgttccccttcatacgagattaaaaggaaagttgaaaatatttaggtaaacttttacatgatttttcttattaagtgaaaagctttacagaatgaaagcgatctcttctttttatgaaagcgccatcttataatataaatgtgcggtaaatgaaaaggagatacacgatgagaaagatttcacctgaagttgcaaaacatatggataatttatctaatgaggctggagtaatcagcgcattagcaattgaccaaagaggatcattaaaacgaatgttagctgaggcagcaaataagcctgctgatgaaacaacaattgttgattttaaggaagctgtttctagtgagttgactccatatgcttctgccattttgacagatccggaatatggtcttccagcaactaaggttagagataagaattgtggtttattattatcttatgaaaagaccggttatgacactactgaaccaggtagaatgtgtgatttaattgctgatcaatcagcattaagaattaaaaatgatggtgccgatgcagttaagttcttactttactacgatccagacgaaagtgatgaaattaaagataaaaagaaggcttttgttgaaagagtaggagccgagactaaagcgaatggattgccatttttccttgaattattaacttatgatgggaaaattgatgatgctaaaggtgaagagtacgcaaaggtaaagcctgaaaaagtcttcaaaactatggaagaattttctaagcctcaatatgatgtaacagttctaaaagttgagatgccatttaatatcaagtttgtagaaggctataatggcgacaataacgttgtttacacacaagaagaagcaaagaagttattgaagaaacaatcagatttaactgatttaccatatatctttttatctgctggtgtaacttcagaagaatttattgcagaaattaagatggctgaagaagctcgtgctgactttaatggcgttctttgcggacgtgcaacttggaagccagcaattaagccatttgcggccgaaggagaaaagcaaggtagagaatggctttcaactgaaggaaagaaaaatatcgaaaacttgaatgatgcccttaaaggtgccaaatcatggaaagataagttagaaattgaagaataataaatgaattaactatcgaaaaacaaggtcagaattggccttgtttttttgtgtatgcataagtttagacgtaacttgaaaaaacgtatttaacgcaataaaataaaaaaggaattgttaatttggaggaaaaaatgaagggattaaaatatacaagtttggctgttgctgcattaacagctactcttttagcaagtactaataatagtaaagttcaagctgctacagttgataaaaataacactgttacagttgctaaatcagataaagaaaaattacaagatgctgttaaccaagcacaaaactcggttaataatgctcaagcaagcgtagatagtaaaaagagtacattaactgacgcacaagcacaggcaaaagcaccaaacgatgcttgtgatgctcaacaagctaaggtaaatgatagccaaaagaatctagctgataagcaagctattgcaaagcaagcacaagataagttagatagtgcaagtgcagtagcaaagcaagcaacttctgaaaatattcaaaagactcaaaagaatattgctgcacagcaagatgcaattaaagctgctaagcaaaatgtcagtgatgcaaatgcagatttaagtacagcacaaagtcaattggcgactgctaagcaaaaacaagctgatgctcaaaatttagttaacagtaaagaagctgcaaagaaaactgctgataataatgttgctaacgctgaaactgctgttaagaatagtggactagatgaagcaaaacaaaatgttcaaaaagttcaaaacgcattaaatgatattaagaagacaaatgcggataacgaatcagttttgtctaagaatcaagctgttttagctgaaaataatcaaaagatagcaactgttaataataatcttgcagtggcaaacaaggctgtagtagatgctcaaaacaatgttaatgctaaacaaaaggcgctggctgatgcacaacaagctttgaaagacttacaagatcaagttgctcaagatcaagcaagcggagcagctggtttctttaaggcaattgctgacaataaagataattctgaaagtttaagagaagatgctcaaactgcatataatatcatcactggtcaaccaaatgcttaccaggatattactgtagaatgggctaaggaagctgttaaattaggtcaagaaaacgactcaacttcattaagtaatatagaaaaggctcttggatactatcaacactggatgacatatcgcgataagtatggcttaagccatccatcaatttctttgacagctgtggctattgccatgcttagctcggactttcaacattactctgatgaatttaatcatcctagtttattaactagtaagtatggtccattttatagcgatgaagaagatatatcagctggagaggttaacccaattgacaattggatgagtgaaaaagacgatattgataaatatattgaagctcatccagatgcagctgcttatagttttgaaagtacccatcctctaactcaagatgagtgggaaaaagatgttgatttttggaacgataaaccagtatatattggacactatacatccatgattaagccagatgctaactacgttggattggctggaaatgaatatgaaattcaaccaatgatgaataatgcagatagtatggatgaaattatatttaatccaatcaatggaatagattttaatagttaccaaaacttagttcaatcctacttgaaagatgttaagcaagaagataagattaatacccttaaagctaacgtagctactgcaaatcaaaacctagttgcagcacaaaatgcagttaaatcagcacaaaataacgttcagagtctacaagctaacctagcagaattaaacaatggttctactaagatcaataaggcaatttcagatacacaagctgctcttgctaaaggccaagaaaatctggaattcgaacaaaaacaactagatcaagcaaatcaaaccttagcagatgttcaagctaaagttggtacaaaagcaaaggctttggaggatgctaaagctgcccaagctaaggcagcagaagctgtagctcaagcacaaaatgttttatctgaagctactgctgctgttaaggcaagtcaagctaaggtagatgcagcacaaaatgatgttcaagctaaagataataatttaaagagtgtccaagctgctttagattcattgaatcaagctttgaacaatttagaaaatgctcaatcaaatctttccgctgctcaaacagcttttaataaggctaatgatgacgtaactgctgctaataaggcagttaaagctcaacaattaatcttagatactttgaaggaatctaaatctaaagctgatgcacaagttacaaatgcatcagaagaacttaagaaggcagaagcagaattagctgctgaacaaagtaagcttgaagatgctaaggcaaggttagacgcatttaataagaaagaaactgaaaacagtcataaagaagcttctaatgctgaaaatcctgtaaccccaaccaacaaacctgacaccagtcatgttgtaaaaccttcagataaaactgatgaagatagcactgtaaagccaacggataagccggattcacatagtgaagcatcaacaactaattcatctgaaactactacaactgctactgagtcagatgtaaaggatactgatactgtaaaagaaaatgctaaggcagatcttaagactaacaataagtctgaagaaaaatcctctactgttaagattattgataatagtgatagttcagccgtatctgttgtcttaaacggttcaaatactccagttaagacctttggagaaaagacagttaacggtactacttactacaaagttagtgcaaaccgctgggttaaagatgataaagctcatgtagttgctgtaactggtaatgtaactactaataaattgccacaaactggtgcaaagaatgaactaattgcagctctttctggattagcagtcgcaggtactactttggttagttaccttggcattaaccgtaagaaaaagaataattaatttataaaattatatatcgatagaaaaagagttgatagatcaacgttgaaaaacgaggattatcaactcttttttattgtctagcaaaaccggttctaactgaatatgcatctgaaaaaatacgagtcatgatttgtaagggtaatctagagcgtacctcataatcaggaaaataattggtttttgacatgtagcccataaaagtcaatgtcgaaagcgaagcaagttgtccattaggattagtggtaaaggtaatagtaggaacatcatgacgtgataaattttgtgcagcttcaactaattcgggagtattaccatttaagctaataaaaataactaatgcatcttctttaattcttttggaggccgtcttaataatatttggatccgaatgaaattcaacatacttacctgttaattgcaatttaaccataatttcttgtccaattgattccgatagaccacgtgcaaaaatatagactacctttgcttgtttggtcattgaaatactatcttcaatgttactgtagctaagattatggagagtgttgttcatttcaatttcatttttggtaatcacactcttaattttatcgtctgcatcatttaagacatcaaaattactattggaacggtcttgcaattttagtgactctcggtaagaggtatagccgctatagcccattttttgcatagtcctgacgattgtagcagttgaaacatgagcaaattgacttaatttaacaattgacatttttgcaattttttgtggatttttttgaactgtttcccacaaatgtagttctgcattactaagatcattattttgcatgtatgtgccctctctgtaaaactttaccacttattcaatgaaacgctttcaatttagaaaaaccttaccttcttatctaagtatactaataatgtaagcggtaagaaaaggagaaaagctcatgatttatacaataacacttaatccagcaattgatttggtaattattactaaaaaattagagccaaatattgttaatagaactgagaactttgagcttcaacctaatggtaagggtgtaaatgtatcatttattttgaaaaaaatgggtatagaaaatgtggcgaccggaatcggaggcggctttacacttgattacattacagcaggtttaacagaaaaaggcatcagcaataattttcttaaggttaaggaaccgactagaattaatgtctttactcgggtaatagatcaaaatcgagaatataaagaagtaaatcctggtccagaagtaagtgaaaaagttcaagagcaatttttaaagtatttaaggacaacactaaaagaaagcgatactttaattatttcaggaagtttttctagagggattaaccaagactacttagttaaaattgccaaagttatggctgataaaaaagtaaaactagtaattgactctagttctaaggcagttttagatactttgccttattatccttatttactaaaaccaaatgatcaagaattagctagtttttttgatttaaatgaaaaattggatcaagaaaaaattattaaactagctagaaagctgattgatgacggttgtaaaaatgttttagtctctcttggagattcaggagcggccctcattgataagaatcatgcttattttggtaatgctcctaaaatttcagtcatcaacacagctggagctggagataccatgctcggtacatttattggaaaaaaagaattgggatgtaacacggtagaggcattgaaatttgcaatagctgctggtagtgatactgcgagtcgcatgggactaacagattttgaactagaaaaatatttaaatgagattcacgtaagtgaagttaagtaatagaagggatgaaaaagatgactcaatatgatttagtcggagcaactgggtgtgcaactggtgtagcacatacttttatggctgaagaagcattagagaaggctgctgaaaaattagggtattcaattaaaattgaaacccatggtcaaacgggtgttgagcatgaactttcaccagaagaaataaagaatgctaagggtgtagtgattgcttcagatgtagatgttgatccagaccgttttgctggtaaaagagcggtgattgtacccgttgccaaaggaataaaagagccagagacactaattaaggaagctctaaatcctgatacacctatttacaaacctggacaaccagctaaaaaatcttctacagctggaaatagcgctgaaaatttaggaactaaaatttacacgtctttaatgaatggtgtttcccacatgttaccttttgttgtagcaggtggtgtgctaattgctgtctcatttttctggggaatttattctgctgatcctaagagcagtcagtataatcaatttgcttatatgttaaatacaattggtagtacgacgatgggattaatggtcccagttttaggggcttttattgctgaagcgttagctaaaagatcaggcctagtcgttggttttgcggctgggatgattacaagtgttggcggcggtggtttcttaggagctattattggtggttatctagcagcaattgtagttctcttacttcagagattgttaaaaccacttcctgataaagaatttagaggactaaagtcaatttttttacttccagttttaggtgtattcattactggagcaattatgttttggctcaatggaccaattaaagcaattaatacgggtatgatgtcctggttaaagggatttgaaaattctagtccaattcttttaggaattattattggtgtaatgtgtgcatctgactttggtggaccaattaataaggctgcttatgtaacaggtacagccttactagcacaaggtaactactactttatggccggtgtatctgctgcatgtattgctccacctttagcaactggctttgcagttttattaaataagaaggcatattccaagaatgaacgtacagctggttatgttaattttctactaggatcaacccatattacggagggtgctattccatttgctgcaaagcatcctttatggaatattcctgcatttatggttggatcagcaattgcggcagccttgacttatatctctaaaattcaagttccagcccctcatggcggattcattattttaccattagttaacaaaccatttttatgggtattatggatcgtaattggttcattcatttcaggaatcttattagctttgattgctggtagatttgcaaaaagagagccagaatttgaagatggccctgatctagatgtatttggtgaagaagaaaatgtcaaaaagcctaaaactgtagaaaaaaataatgctgttacggactataatccaaatgatattttggaaacgcaaaatattgaagtaaatgttgatgtacccaataaagactcagctttaaaatacctagctaatttagcagtgaaaaatgggttggctactagtagtcaagctgtctatgataagtatttagttcgtgaaaaagaaaattctactggaatgacagatggctttgctatcccgcatgcacaatctgcagctattaaacagtcagctatgttaattttaaagctaaagaatccgattgagtgggattctttagacggtcaaaagattgatactgtaatttcatttttgattcctgaaaaggatagtaagaagcacttacaatatttgtctaatacggctaaattgttaacacatcaagatttcattgagaaacttaaaaaagctcagacaccagaagaaattaaaaatttgtttgctaacaactaaaaaagaaaactgccagaaatggtagttttcttttatgtttaatcatagactaataattttaataatgatatcatttatataattacttatgacttacaaggaggaattttattaatggcattactcaatgtacgtggcggtgctggtgacattactaagcccgatcttaatgcaagaccacaagataatctttacttagcagtgaactctgaatggattgaaaaagcaaaaattccttcagaccgttcaagaattagttcttttgatggtattgatttgaatattgaaaagagcttaatgcaagatttcgcggattttgcagatggtaaaaagaaattgccaaatgttcctaattttgaaaaagcagttgaactttacaaaattgctaataactttgacaagagaaatgaagacggggcaaagccaattaaagctgaccttgaagaaatcactagtttacgtaatttaactgatcttaacttaagagcagctgatttttacaagaatgcttttgacttaccaatcagtgtgtcagttgatgctgacatgaaggatactaaagttcatgttgtgtactttggcggacctggcttattcttgcctgatactactacctacgacaatcctgcagcagctgatttattgaaggtattacaagatcaatctgaaaacttacttaaaatggctggcttaagcgaagaagatgctaagaagtatgtggaaggtgcattgaagtttgataagaaactttctaaggttcttaagtcaactgaagaatgggcagattacccagcaatgtacaatccaatgcctttatctgaatttgaagataagtttgatagctttaagattgacaacttcttaagtaatttatttgctcaaaagcctgagaagattattgtcactgaaccaagatttttagatcatgttgaggaattgatcaacgaagataattttgatgaaattaaaggctggatggttgttaagtttattaatggtgtagctgcatatctttctcaagacttccgtgaagctgcttttccatttagtcaagctttatcaggtcaaccagaattgtcttctggtactaagcaagcttaccgtttagctaatggtatgtttagcgaagtagttggtgtttactacggtcaaacttactttggcgctgaagctaaggctgacgtagaagatatgattcataagatgattgacgtttatgaaaaacgtatctctgaaaataattggctatctgaagacaccaagaaaaaagcaattgttaaattacgtgctttgattttgaagattggttatccagaaaagattgaagaaatctatgatcgtcttcaagttgtccctgaagcagaaggtggtagcctttactctaatgaaagcgcagctgctgtagaatcagttaagtacaaccttgagaaattaactcaaccggttgatcgaactgtatggctcatgcctggtaacttagtaaatgcatgttacgatccacagagaaatgatattaccttcccagctgcaattttgcaaaagccattctatgacttgaaacaatctcgtagcttaaactacggtggtattggtgttgttattgcacacgaaatttctcacgcctttgataacaacggtgctaaatttgatgaattcggtaacttgaagaactggtggacagacgaagactttgaggaatttaagaaacgtactcaagccgaaattgatttatttaacggcattgaatatggtccagttaccttgaatggtaaacaaattgtttctgaaaatattgctgaccaaggtggtttgactgctgctgttgaagctaataagggtgaaaatggaaacatgaaggaagtatttgaaaactttgctcgtgtttgggcaaacaagcaacttcctgaatcgattaagacacaagtttcagttgatgttcatgctcctggtcctgaaagagctaacgttcaatcacaatgccaagaagagttctacaaggcatttgatgttaagccagaagatggtatgtggttagatccagaaaaacgtgttgtgatttggtaaaaaataaaaactaattttagaatcaaatggcgaaagctgtttggttcttttttcattgtttgcaaaaagaaattattaataatattatgaattggtattcttatcacttaagacaatattcttaattagaaaaggttaaacatgttagaaaaaataaaaactaatagattttgccaattcatctggccatatttattaatcatcttggctacaaccatagtcatttcaccacagctaatctcacacactattttagctagtgatgacactgctgataccttatttcactatagtcgcttttatgatgcagggatgcagcttaaaagtggaatctttagcattttccaaactaattttacttttcagcagagcggaagaattattaatgccatttatgggccgcttttcgcctattttaacgggattttagttcttattgctggtaattggtttaactatcaagttatcttagcctatctaatttctttattgggtgctgggagtatgtattacctcctaaagcaggtaggtattaataagcttttagctactgtaatgggaattatctatattaacattgggatgattccagcctttatcaatcgtagttcttttaatgggtggggccaggcgttaatgccgctagttgttttatgcggcgttcgcatgatttgcgataaaaaacaaccaattaactggattcagttaatgattgtgatgagtctgcttatccaagtccatgtcttaagtaccttaatggcagtcttgttactgattccattctttatctactctttaattattaacaataattctaaaaaagtttggataccttttattaaggcagttctaggaaccgttgtcttatcagcaaatgtaattggtgcatttttagttttaatgccgacgaatcacctttctgcgactactgaatttgatttgtctcgtggcggattgcgaccacatatgctttggcataacgaatatggaacagcatttgcatatattttgccaatttttgttttattgattattgcgcaatttatctatgttgtcatgcactataaacgagacaggctaaatacttttgtaaccatttgggggactgtcttattaggcttatcttcatttgtttttccatggggactagttcaaagagctttcccaagcttaaaatcctactttcagtttccatttagattaacagttgtggcatatccattgattttactagggatggctttaacggttaactacttactaaaaaagggagttaagccaaaagcagttggcattagctcggtaacaattttacttttagaagcagctgtgccaaatataattaccaaccacattttcacagttgcttgtcaaaaagatgcacaagttcaagttgtcgctaaacaatcaaccagtgacaagatgctagaaatgttgaagtggcattatttaccagactatttaccaacgaaagataagtcgattgaccaaaacgcagcttatctatataaaattaacgttgttgagcgataccaaaaatttgatcaccgagttactaaaaatggtgatttagtattatcttggaaggctaataaagataataagatagttttacctgttgtgctttacacgcaaagtgaactaacagtgaatagtaagaaattctccggtgctaaaaatataattgggaatccaattgttaatcaaaaagctggattaaatcgcgctattttacactttgccgtgccaagctggttctatgtaattagtgcaatttcattaatttcttggcttttagttattgtatttttactatggaaaaaatttataaataataaaaacaattaaaagatatcgaaatcatatataaaagcagttccttaataagttaaatgtattagggaattgctttttgtttgtatggtttatttacgattaatatcaatttatttttcaattaatgcatggctatagttaacttgttatgttattatttaactgtaagaattgaaaccgctttctatggtttcagaggaggaaaaaagttgagtacacaagaacgttattctcatgatgagttaagaaaagctaacaaaaaatttagtcgggttcgttctactattgaatctgccttttatggtaacaatgtacacgaagtaactagtgttgctgaagcttataatttagctaagaaacaatctggtgttatcgaaactgacctaccaattttacatactaaagaactcggtttaccacagggtgcaaagcaattagtttataatcacggtaaaatcttgggtagaacagcaagtgcacgtcactttgttgacgatccaaaagaggatcctgaagcattagctggcaatttacgtgaagatatttataagggccatgatcaaaaattcttaaaagcaacagttttagtaggattagatccaagctttactgttaaagcacatattatgatgccagaagatcaagcctttaacttactttcatatatcttgaacttccatttctttgatgaagaagcagaaaagatctataagaactcgaagttatatgatgaaggagatatttacttctactttgatccaaatacacaagatgaagactatcaaaagggctttggtgtctttgatgctccacataactgtgctgcagtctttggcttacgctacttcggtgaattaaagaagggtactttaactcttgcttgggctatggctcacagaaacggttatactgcttgtcacggtggtgaaaagtcattccactttaaggataaggatgataaagtatttgctttctacggcttatctggttcaggcaaatctactttgactcatgaaatgtatgatggtaaatatgatattactgttttgcacgatgatgcatttattatttctcgtgaagatggatcttcagtagcattagagccttcatattttgataagacgcatgactatccagcaggccaccatgagactaagtactacactacaattatgaactgtgctgttactcaagatgaagatggtaagaaagttattgtgactgaagatcttcgtaacaataatggtcgtgttattaagacacgttatacttcaccacatagagttgactatgaaagtgcaccaatcactgccttattctggattatgaaggatggttccttaccaccaatcttaaaggttgatgatccagttctagcaactacaatgggacttactttagcaaccaagagaactagtgctgaaaacttaccaaagggctttgacatgaatactttggtaattgaaccatttgcggactcattccgtgcttacccagtatctggtgactactcagactttaaggaattatttactaagcgtggagcttcttgttacatcttgaatactgatgcatttatgggtaaggatattccaaaggaagtaactaagaagttagttgaagatcttgctaatggtactatcaaagacagtgactggaagcaatttggtaacttcaagggtgtatcatacttgccaattgaaggctacgaagttcacttagatgaccctgaatatcaaaagactttggctaagagaatgcaagatcggttagactggttgaataagtatgatgaagaacaccctactcaaccaattcaagaagaagctaagaagaccttggaaggtattattaaggaattaaattagttaaacatagttagaaatcctcttaaaaatttttatatttgaacattaaaaaaggcatcccgacagggatgcctttttgttagccattaacttgccttactctttaagttctccttcggcttgaagcttctttttgatatcttcaaatttcttaggagggatgcgagtaatatgttgtcttctttgatttcctagaatcaatggaacacgttcaatgactgtatctgcataatctaagccaaaccatgaagcagggtttgaggaaagattttgaagccatacacgggcttcaactaagaatttttcataacttctaagttgtgtttgtggactaattacatcgttaacgataacgaatgagaagtcaccaacatctctaccaggagtagtagtgtactcttgtggttgagattcaatagttccatctgcaatcaagtcatgaacaatttgacgcaagtaaacattcacactagtttgctgcttgaaaccaaggaagagctgaacgttaatgacattctttgtaccataagtgttaacagcatattcagcagtgaatggctcgttagttacattaactgttacaaaccaatatgcgcgtgctcgcttaggacgtttatctaagatagagtagagaatttctcgcttaataaacttattgtacttaacttttgccatatagactaagttagttgcaaaagtaggataatcttcgtcatgacttaagttcgttaacatatccacgtattcatcaagacgaacataagcgttacgtgattcacgcttgtctctaattttattaccgtagtaccaaacgtacataatgattccgatgaatccggcaataactagtgaaacgtaaccaccgtgcatgaatttactcaagctggctaacataaacattacgtctaaaaagccaaagaaaattaagaagagccaattccaaatggtatgaacacccttcattgccaaccattcatagagcagaattgttgtcattaacattgaaatggtaattgacaaaccataagctgcttccatgtgcgctgaggtttggaagaaaagaacgattgcaatagttgctgcacaaatcattttgttaactgaaggaatataaatctgtccctttttagtggaaggatacataatattcattcttggtaaaaatttcaaaccactggcttcagctactaaagtaaatgaaccagtaatcaaagcttgtgaagcaataacagctgcaatagttgctaaaacaatcgcagctaaacgaatgttttgtggaataatttcgaagaatgggttgaagtcaccatttcccgcattgtagttaggattgtttaaaatccaaacaccttgaccgaagtagttaagtgacaaacaaacaaagacatatggccaggaaccaataatgtttcctttaccaacgtgaccaacgtctgaatacaaagcttcagcaccagtagtagcaaggaagatagaacctaaaataaagattccagctttgttgtaaggactgaataaaagtttaattgcgtagtatggattaagagcttgtaaaattgaaagatcccccatcatattcattaatccaattacacctaagaaggtgaaccagataaacatgattggaccaaaagccttaccgataatacttgtccccattctttgaattgagaacaaaagtaaaagaattactactgtaatcgcaataacagttccttgagtagaaactggaacgttaccatgaccaaattcaattccttttaatccttcaatcgcagttgtaacagtaactgcgggagttaaagtaccatcagctaaaattgctgcaccaccaatcaaagcaggaaggacaagccattttgctcgtttccggaccaaagtatagagggcaaaaataccaccttcaccatggttagtagcttttaaggcaataaagacagtttgcaaagttgttaacagggtaactgtccaaagtactaaggaaatagaacctacaataaagtcgcgatttacgttcgcaattccgccgtttccggcaacaattgatttcataacatatagcggacttgttccgatatctccgtagacaataccaatagcaatcagtaagcctgcggctgatatatttttccgtgttttttcattcattattatattctcccaataaatagccaaatagctaaatattcaataacgtaaaaaagaatgccgaaaagacattctttttttaaacatatctattttcatctatttgcgcaagagttgcaagtatctgcaggcgattaattaaaaatatttatttcaatttagttctttgaattgatttaatattttgtgagcctaggattaatggaactcgttcaactactgtatcagcatattctaatccaaaccaaacagcaggattagaagataaattttgaagccagacacgactttcaactaaccacttttcataagtatttaattgagtttgtggactaatcacatcatttacaattacaaatttaaaatctccaacgtcacgaccgggagtcgtggtgtattcttgtggctgagattcgattgtaccatctttaattagctcgtgaactatttgtcgtagataaacattaactttttgctgttgtttaaaacctaaatatagttgaacgttaatcacgttttttgtgccgtaagtattaattgcatattcggcggtaaagggttcgttagttacattaacagtgacaaaccaatatgcatgggcccgttttggacgtttgtctaaaattgagtagagtatatcgcgcttgataaacttattgtacttaaccttagccatataaactaaatttgtcgcgtataaaggcacactatcatcatgacttaaattacttagcatggaagtgtattcgtctaaacgcacgtaagcatttttagcttcgcgtctatcacgaactttgttaccaaaataccaaatatacataattgcaccgataaaggcagcaataattactgttacataaccgccatgtaaaaacttagctaaactggaaattaaaaacatactttcaattgcaccgaacaaaaacagaaaaactaagcgtaacaagatgttaactttttttagagataggtactcaaaaagtaatattgtcgtcattagcatggtaacagtaattgctaacccgtaagctgcctccatgtgttctgatgtcttaaataaaaagacaattccgattgtagcagcgcaaagcattttattaatagaagggatgaagatctggccttgttcagttgagggatatataattttcattcttggtaaaaattttaagccacttgcttctgaaactaatgtaaaagatccagtaattaaagcctgagaagcgataatggctgctaaggtggctaaaatgatggcgaaaaatttccactgacttggaagagcttcaaagaagggattaaagtcagtattaccagcatggtagttaggattttctaaaatccatactccttgaccaagatagttcaaggctagacaaataaagacgtaaggccaagaagccatgatattgccttttcctacgtggcctacgtctgaataaagcgcttctgcccctgtagttgctaaaaagacagctcctaggattaaaacaccaaccttatttgctgggctaaacaaaattttgactgctaacacagggttgagagcctcaaggagcgacaagtcatgacttaggttcatagcaccagttaaacctaaaaaagtaaaccagataagcataattggcccaaaagtttttccaattatactagttcccattctttggatggaaaataaaaataaaagaatgatgatggtaataataagaacactgttttgattaggaacgggaatatcattgccaaatctcatgtttttaagaccttcaattgctgtcgtgacagtaactgcaggtgtcagtgtgccgtctgcaagcaaggcagctccaccaattaaagcaggaagaactaaccatttggccttttttctaaccaaagcataaagtgaaaaaataccaccctcaccatggttagtcgctttaagagcaattagaacatacttaactgttgttaaaagagttattgtccaaagaataagagagatagatccgactatatattctctgttaacactagcaattcctccattttcattcacaattgccttcataacatagagaggacttgtaccaatatcgccatagacgattccaattgaaactaaaaggccagctagagtgaccttttttcgtacaccattattcatattaaaatttcctaataaaataaaacgtaatgacattttagataaataaaaaagaatgtattaaaacaatacattcttttttactagcactattttgttcctttaggattcaatatgcaactaataatttgtgatttttttatgaaagagtttgtttaatctcgttacgacgatcagtgtaccatttttcccaatcttcgtaagtcttcatgttttgtggatctacgccagtttgtttttggatgttgttaagcatatccataaaacggtctccatgaatatttaaaacatgcttaaccaagttgcgacggctgaaagccatattgttagttaagtatgtattaatttcgataacatcatgattaccatcataaacatccataatttcaagatcgctttcgtcaaattttgaaatgtagaagttagcaaatgtctttaagtaatctggttgttctttaaattcagtagctggcatttctacacgatttgcctctggcataactacttcaaattcttctttttcttgagtttcttcggtgttcttcttgtcttcagtcaaagttaagagctcctttactgtctagctgtacaaaaattcaatataatcttacattgaattacaatcaaaagcaaattttatagggcttatttaaagttttctacatcttgtttggtgtaagaatcaattgtagtatgaccactattagcagctgatctcatgaagttaactactttttgatcagaccatgaactagtatcaacgccaattgaacttagttgattacgggtttgagaaattactctaccagtaactgtttgaccgttaatcatcatactatcattacttgaagttgatgaagaattagtatttgaattgttattattagctgtagtgttgctgcttgagcttgttgcactagatttttgacttgcagcattgttgtcttgagagtttgagctatttgaattacttgaactcttgttagagttagaactagtgttgttagtattactactgtttgatgagctagattttgagttagaactttgcttgtttgaagtagtagcttcatcgtcatcattagcatctaggttttcagtgtcaatgtcatcgttaacattttcgctgtttaattttgcattagcaactttacgtaaatgtttaacgttcttctttaccttcttataatacttactattaatgtaaggtaagtctaaaatttgatcacaagattcgactgctgcttggtagtccccgtctctgtagcttagtttagccttcttgtacaaaggattaatatcattagtgatatgatcttgaaccttgtcgattgtcttgtagagtttagaagcttgcttagtcattactgagtagccattggtcttgttggctgctttatctaattcacctaaggcatctttaaattcatattctctaatttcttcttgagcatccttcatgtcgccagcttgatctgcataagcttttgattcagaagtggattttacatcatgtgcatcttcaaatttttcttcagctgtttcatatttttgactagaagcagcatcttttccttgattcatataggtggtgtacttgtcggaaccactattagatgaattatttgatgatgtgtttgaacatccaactgctaaaaaggtaatgaagaatgccgtaatggcaactccgagttttgatcgtttcatcattttttcctcctataaaaatgaatttatcttacttaaattataccaaattcacgtatgaaaaatttgttgaaaaagtggcacaattttttgagataaatcgttagtaatagtgtaaggcaattcaccggtgctgacttacaaaaattaattatcagtttgactatttagaggtataaaaatggaatttattttaaaggatcaatcagttcaatttacttttgcaggtgaaaaatatagcaatggtaagaaaagtagaattttaaaaaatgttaagaagcaagctagtgctgaagaagtaatgaaggtaggaaatgccttatctaagttgcagaaagatgatggtattaaaactgctagactaatttcatattcagatattcaagcttaagaaaaacacataaataaagaaaaatttaggagaataaaaaatgactactactaaaacattaagacttacatttaaaaacgctaaaaataagaaagtaaatctatctttaccggatgcagcagaaaacttgactgaaaatgaagttaaggatgctatgaacgaaatgtgtgaagctaacttatttgtaaaggaagaagttgatcaatatcaggctcctttatctgctcaatatgttgaacgtacagttacttctgtgtttgatgatagtgaaaagaattaggacgatattttttgagataagaaacttgattaagttattaaataaactcttaaaagggtaatgtttcggcattactctttttattttgagatgaaagtatgtaatttatgttacttttttatttcagaatgtttgttcggttgtatctggcaacttgccaaactataataaagggtgtatgtaaattggagggagtttaagtgatgaaaaaacgaacattcactggtattgctaccgcggcacttataaccactgccggtatatcagttaccaacaaccttaaaccagataatcctttaaaaactggtgaaggtactgttcaagctgcaacctatcaacaagaatttttagataaagctattccagctgctacgactgcatcatctaagtatggtacttatacttcagttatgcttgctcaagcaacagttgaatcagcttggggtcaatcaggtttggctcaagaacctaataataacttatttggtattaaaggctcttacaatggtcagtcagtaaatatgaatactggcgaatacggtaatggtggttactacactactaatgccggatttagaaagtacccatcatatactgaatcatttgaagataatggtgctttattacgtaaccaaatgggtaattattactctggtacttgggtagaaaactcaaataactatgctcaagcaactcaaaatggtttacaaggtaaatacgctactgatccaaattatgctaagacgcttaatagtgtgattgcaactaatggttttgacaaatatgatcccgttacacaagttgttaacgaaaatcgtacagttgcacaaacaacaccagttatgagtgcaccagttgatcctagtgttggtacacaagtagatactgcaagagttggtcaaaacgtaaatgttactaagtatattacttataacaacggtgtaaaacgtgcatttattggtaatggctggattaatgcacttgcatttagcccaattactaataacactactgctaacaatgccactgctaatactaataatagtaataagcaaactacaactactaacaaccaagctagccaaccagttaagactccagtagctcaaactcaacagtctcagactcaagctcctgcagctccagttaaagcagccactgttgaaacaaagaaagttgcagaagttaaaactccagcccaaactacgactttgaatgttaaagctgaaactaagtcagctcagccagttaaacaattagctacttcattagcagcaactccagctaagaaagaagaagttaaaaaagaggctgttaaggctgaaccagctaagactacgcctgtaaaagttgaagctcctaaagctgaaaataaagaaactaactctgcaccagtagttaaagctcctgaagttaagactactaatacagttaaaaatactgaaactgtaaagaaagaaaccactccaattgttaaggtagctgaagttaagaaagctgaagccccagtagtaaaaccagttaaaactgtaaagaaggaaaccactccagttgttaaggtggctgaagttaagaaagctgaagccccagtagtaaaaccagttgaaactgtgaaaaaagaaacaactccagctgttaagaccactccagtagtttcaactaaagaatcagctaaagtagttgaaactccagtagtcaagcctaagaaggttgaagttaaggaagttaagaatactccagtaaccactagtgctaaaactgttgtaaaaccaactgcttcagttgttgaaaatgttgcaccagtacaaagttaccagagtgctgtatcgactgcagctgcaaataatagctatggtactcaatggattagtactaatactgctccaaaggctgcttctactgttttggttaaagtaactaagactacccaagttttatcagctccaaatggtcaaaaattaaaccaacaagttgaagctggtagtgcatttgtagttatagcttcaaaatatgctaacggaaatttatattatgaaattagtaatggtaaatggattatggcaaaatatactactcaagaagcacaaattactgcaaaatctggtgtattaactattaattctaaaccagactatggtgtagcagtatggcgtgttccaggccaagatcaaatttcaggtaagttcttaaaagatggttcaagttggagatacttccgtgtagctaatgttaacggacaaacttggtacgaccttggtggaaatcaatggatatctgccaagtcagtactagttcgttaatttataaaagattagattgtttcattaaaattttttggaggagaaagttttttaatgcgttcaacaaataagaaatttattagtgcattagcttgtgctagtgctatgacagctttagcaattgtagatcctatgggagttactaaaactcatcaagtagcacaagctgcaactgatactgtacctgcaaagtctacaggtgtagatgtttcaagttggcaaggtaccaagttggatcaacaagccaaatctggtgcacaatttgctgtcgttaaagtatctgaaggtactaactaccaaaaccctaatgctcaaggccaaatccagagtgctgaacaaaataatatgatgactatgggttaccactacactcattttggctctaacagcaatcaagcagttcaagaaggaaactatgcagttaattcagcacaacaagctggtttaccacaaggttcatacttagcaactgattgggaacaagacgttaataataatactaacggtagtgttgcagctaatactaatgcaatcactagcttcatggatactgttcatgatggtggatacaacccaatgctttattctagtgaatggttactaaagaataaggttgatactaataagatttctgaaaagtatccaaatgcattatgggtagctaagtacaaaactaatggtcgtgaagataatcctgactacaattacttcccatcaatggacaatgtagctatttggcaatatacgcaaaattggcgtggccaaaatgttgacggaaatgttaatgtagttcctctttcaaataagactactgctgataataacaacacctcaactaacgctgctaataccaataattccaatgctaataacggtcaaagcagtagtcaagcacctgcaaatccaattattaacaatagtaatgctactgctaagccaaataataataacagtacacaaccagcacaaccaactgaaactaagccagcagaaaagccaagtacaaccactaacataaacagtgactggactaagcaaaacggtgtctttgtaactggcggagcaattaacttgagaactggtgcaagcactgatagcaaggtcattattcaattaccagcaaactcagaagttaaatacgatgcttatcgtacaattggtcaatacacatggttaagacaaccacgtgcaaacaacgaatacggctacttagtaggacgtgataatggtcaagcatggggaacattcaaagaaggttcagcaaccactgctaagccagccgaaactaaacctgctaataaaccagcacaaccaactaacaagccaagtacaaccactaacgtaaacagtgattggactaagcaaaatggtgtctttgtaactggcggcgcaattaacttgagaacaggtgcaagcactaacagtaaagtaattgcaatgctcccaacaaacacagaaatcaagtacgatgcctaccgtaccgaaggtcaatacacatggttaagacaaccacgtgcaaatggtcaatatggttacttagtaggacgtgacaatggtcaagcatgggggaacattcaaagaaggttctgcctcagtaagtaagccagccgaaactaagcctgctaataaaccagcacaaccagcagaaaagccaagtacaagcactaatgtaaacagtgattggactaagcagaacggtgtctttgtaacaggtggagcaattaacttgagaactggcgcaagcactaacagtaaagtaattgcaatgcttccaacaaacactgaagttaagtacgatgcttaccgtactgaaggtcaatacacatggttgagacaaccacgtgcaaacggtcaatatggttacttagtaggacgtaataatggtcaagcatggggaacattcaaagaaggttctgctaaagctactaatgcagtagctaataagcctgttcaacaaactactcctaagcaagtaaatactaataacaatgctagttggactaagcaaaatggtactttcattaccggtggagcaattaacttaagaactggtgcaagtactactagcccaattattgaaactttaccaattaatactgtaattaaatacgatgcatactaccgttctggtaactatgtatggttaagacaaccacgtgcaaatggtcaatacggttatttagttggtcgtttgaataaccaagcatggggaacttacagataatttgataacaattttcaaatagactaaatacatgaaagacgtgatcctaatgggaatcatgtcttttttgtcttataataaactatgaaaaaagcatggaggatataattttgatttatacagtaaccttagatcctagtgaaagtgtagtaggtaaaggaattaatatttcacttattttaaaaaaactaggtattgattcaattgcgactggaattgtaaatcacaaaaatgtagagcaagtagcagaagagcttgataaagctgagattgagaaccaatttattgagcaaactcgtggaattaaaattactgctaaaaaccaacaaaaattattggattatttgaaagtcttaaaagctggtgacattttagtaattgccggaagctttgctaagggaatagacccagtttatctaactgatttggctaaagttgctgatcaaagagcagctgcattagtagtagatgttccttatgaaaacgtacttgatatcttaccaatgaacccattattaattaagccaaatgagactgaattgaagcattggttcgaaaaggatgacaaggaagtaactacaaaagaattaattgatatggctcatagcttagtagtcaaaggagcacaacatgttcttttgtccttaggtgcaaatggtgctgcaattgttaatatgatggatgctttaatggcacatgcgcctgaaattgaagaagttgatagtagtggtagtggggatgccttacttggaactttcttagctgggatgcttaaaggatacactcctgttagaaatttagctgatgcaattgctgcaggtagtgatacggctcaaagtaaatggcttactgatttcagaacaacccccgcacttcaaaagcaagttattgctagaagaattacctttgaagaagcagaataaatagaataagttggcttataaaagccgacttattttttgttgttttttagtataatggtactaaatttactataaggggaagaaaagtggatctatctatatttattgttagtttagcagctttagtaattccaatcgttatggcgcgatttaggattaatgctataccaacggcagttgctgagattgtgactggaataattctaggaaaaagcttattagataccataaaaatcacaagcagcgtatcgcttctatcaaatttaggtgtgattttgctgatgtttctatcaggtatggaaattaattttgatctttttaaaaagaaggatttacctgagtctaaacagagtaaaattaatccagcacgaatagcagttattgcttttactgctatcacaataacggcatttgctttagcctatattctaaaattaataggcctatttaatgatgttatgctggctatgattatttttatgactgtagccttaggagtggtaattgccactctaaaagaaaaagaaatcttatctcgaccgattgggcaaaccatattattaacagccgttctaggggaagtaattcccttattgctgttgactatttatgcttcaattaacggtgggaatgctggaagattatggcttattgttctgcttttcctagcagcaattatcttgttgagacgatttaaacaaccgtatcggtggtttaataagatctctaaagcaactactcaactagatattcgattggccttcttcttaatatttaccctagtaacagttgcagaacgtgtaggggcagaaaatattttaggtgcctttttagctgggatggttatgaagttacttgaaccaagtgaagccacaatggataagctaacttctattggttatgggttcttcattccaattttctttattacaacgggtgttaagctagatttaaagtcacttcttgctaatccgaatgctttaatgttgatcccagttttagtattattcttacttttagccaaattgcctatatttttggtttatacacgaaatttcaataaacgtaacagtcttgcgggtacatttttaattatgactacaattacaattgtacttccaacattagaggttgctcgtaagttaaatgcaattactgaaactcaatcagatgcctttattttggcagccgtagtcgtatgtatcttaggcccaattttatttaattcgctctttagattaactaaagaagataaaattaagcaacgagttgtcatgatgggaaccaatgtaatgacggtgcctgttgctcaggagcttcatgataattggtatgatgtattattagtaacccataaaaaagaaaactatgatacttataagagcaaggttgctaatttgaagttaattaacagcttagaagagtcatgtttagaaaaggccggtgtctttgactgtgatattttagtagctggatttattgaagatgacctaaatcgtaaaattgcccgtttagcaaaagagcatggtgttcaaagagttattgctagtcaagagagaccaaagcctgaaacaattaagaaattagtcagtgaaaaaattgaaatttacaatattttcaatgttcagacttctgtattaagagctctaattgaatcaccttcaattttgagaattttaacagatactaagaatggcttgtttgaagtaacggttagaaatcataagtatgctggtcagaaattgatgaatctagactttattgaacaaatgactgttagtcgaatctggcgaaatggtaaatggctagtgccacatggaaatacaatcattgaagtaggagatcatctaatttttacagctaaaggtgaagatgcagaaagaattagagaagaactaggtagaagaaattaaatataaaaaaatgacaggatttttagtcctgtcattttttgttaacgttgatttttcgcttcttgtaaaacagctagggtatttagactatgggtaaaagcttgatcagcagctgtaaaatcatgttgatcaataatcttagtgaattcgataaattcagcaatcattcgatgagaatacttgttgtggttaacaactttcggctcttctcctagtaattggatgccaacttttggcatttcattaggatggccgtaaataatgagtgcacctttttcaccttcaatggtactgacattaggtgaaaagctatctttagctgcaattgaactggcttgtttgtcagaatagcccaagtgaaggatgccagaagtatcaatatttttttgaatagttgggaaatatttaacagaatctggcttaccaaataatttaataataatgtgtaagttgtagatgcctaaatccattagagccccaccatcttttttaggatcgaaagctggttgaatgtccccttctaagaaagcatcatagcgacttgaatattgagtgtaattaagattaacaacatgaattggggcaattttagctaagttatcttcaatgaatttaaagttttctaaataaatgttagtgatcgcctcaacaataattacttggtttttatcagcaatttcttttaattcacgtgcttcatcagttgtagcaacaaatggtttttcacaaatgacgttttttcctgcttctaatgcggccttggcaatactaaaatgcaaactatttggaacagctacatagacagtatcgatattagcatcattaaataggtcagtattgttatcgtataattttgaaatattatacttttcttgcaattcaagaccaatttgatggctttttttagtagttgaaagagccgcaagttcaagatctgggatttgatcagcaattgatagaaaatcatgaacaatttttcctgagccaataatacctaatttcataaggtaatctcctttaattaagtttaaaatttaattttttagcatttttagtaactgaggaaggtacggttaactttttaactttattaatgtcataaagatgtaaggtgagcgtaccttctttcttagtattataagtaactttatagtacatatcagttagttgttcttttcgattagtagaaattcttaaatcaatatttttaacattagttgactgtggatcgctagtgggagcgacagtagttgctttttgcatgcttttaattacatcgctattatcacccttataagaaataatatagccattgaatccgttagatttaatggtcatatgtttaaaggcatcgtcagaaaattgggtgaaatcatgtgcggtataaagctttttatagcctgaataaacttcactaaagatggcattttgtttaatgtaattccattgtttggtgccatcacggtggtaaacatagtctttgttaccccataactcagaattagtatcagacttagggatgcttttcatggtaatatggatggcattatctggaccgacgacataatttgaatacatttttgactttgcattggtagttttgacattaacgcgtgcagtagcaatttgggtattggcagccgtagttaatgcatctttaacgcttggcttattaaatgcaataattgcgccccaaactactacgattaggataataatacctaaaattaaagcggcaattttgccgccttgattgttagaaaaaataatctttttatctttgattttatttttttccatcagtgtatctttctaaatgattattgattattttgttcttcttgtgctttcttgatgtcttcagcactaattgcattcttttgaatgtcagaaggaacggctaaatcactgtgttgacctaattggtcgtaagttaggttccaagtgaagttatattttccgccagcagtatattgggccttaaaggtcattgattcgacatttttggtagttggatcaattaaataagtgatcttaagattttgaacttgagctgattttactaagcgggctacctgcatattttgagaaccaggagtgttcatggcatcgataattaaaggattgactgcattccatagattagcgtcggtaccatcaaaactaatttcataatttccattttttctttgaacagtggctttttgagctaaagatttgttaattttattaaaagttgcaggatcgaatctttcctttacttggtctgaatcaaagctatctgcatcaattgagtttttaatccaatggcccttgttttgctctaaaagtaagtacatatccttcttggtaagccacatttgttcagtttgagatttcttcttttgagttaaggtataggtaaggttagttacatcacctttgtctttgaataaaccttctgattttgacttttggttcatttcattagaattagtagtttgagtgaagtgaccgttagcaaagctagaattaaattttgcattgattaatgaacttgcagaaggtccagtactctttgcttgtttactgcttttatttgaacaagctgtagttaaagaaactaaaattactcccaataaaattaggaagctgaattttttcttcataaaaatatattcccccaataaatgtatctatcttattttattttactctatttttgactgaaaaaagtattctaagagcttaactttagtgctttttaaggacatttaaaatattgcgcaatttactgcctttaacttgtaagttacttactgcttgggttacttcaatgcagccaatatatttaccatgttcattgtgaagactatagaaggaaatgttaattggttgtttatttttggtaatcatgattgaaatgtttttacgcttgccggcgtgcatttgatctaggacttccttaacatgcttttgactgtggccgggatgcacttcaaaaacagtcttacctatgtctttttcagtacgcttaaataggcgattctcattcatagaggaccagacaacacggtcgttttcatctaaaacgtccatttcttgtggaattgttctaaaaattgcatttagctgttcaagtgagagatgcccaccatctaacttgatattttccataattaaatacttccaattcatcaaaattaatatatctatcgttattttaacattaaatattttgtgaattaatcaagcttttttccgtaattcctatgaaaattttgaataagcgtgtaaaatagttagtgaaacattgaattttaaaggagatacagttcatgtcgaaattagttttaattcgtcacggtcaaagtgaatggaacctttctaaccaatttactggttgggttgatgtaaacctttcagaaaaaggtgttgaagaagctaagaaggctggtcgtttaattaaggaacacggtcttgaatttgatcaagcttacacttcattattaactcgtgctatcaagactttgcactacgcacttgaagaaagtgaccaactttggattcctgaaactaagacttggagattaaacgaacgtcattacggtgctcttcaaggtttaaacaagaaggatactgctgaaaagtacggtgacgaacaagttcacatttggcgtcgttcatacgatgttttgccaccagctattgatgacgataacgaatacagtcaagcacatgaccgtcgttacgcaaatcttgatccacatatcgttcctaaggcagaaaacttacacgttactttagatcgtgtaatgccattctgggaagatcacattgctccagatttacttgacggcaagaacgttattattgctgcacacggtaactcacttcgtgctttaactaagtacattgaaaacatctctgatgatgacatcatggacttagaaatgaagactggtgaaccagttgtttacacatttgacgacaagttagatgttgttaacaaagaaaagcttgacgactaatttttagttcttgagtaaaagaagctccgacgaaagtcggagcttttttgttgagagggataatcatgagagaaagaattgtaacatacccagcaatctttaaaccaattgaagataatgtttactttattagttttcccgatgttaagggagctattactgaagggcatggactaaaagatgcttttgaaatggcagcagatgcttggggaacaattttgtttgatgaaaagaaattgccaaaaatgactgatcccgctgagattaaaatagaggatcctggcacttttgtcacattagtatcgactgatctaactaagtcagtagctagctttgaaaaaatataactatacctgctaagctggtcctccaagctgagaaaaagaaaattaatttttccaaagtattaacagaagtacttaggaaaaaattgaactatcaataattaccaggcaaagctaaaatatattaatggtgacattcccttaaaaatcttatataattgtaaaagaaaaggagatagagagtgcgagtctctacctccaatcgtaacttaagatgactgagtgtgtggctaatccttgtgattagccttttttgttattgcataagcaattgctgcacggattaggaaaatacccaatgcgtttaagacaatgccgatagcaatagcagctattatcaaggcacaccaacactccagcctatccaaattatcatggcttccacctccgtaacctaaaatatatgtgaggggtgtagagccatgaaaagttactaagctcttatattagctatctataaaagcctagtaaaaattatatcaaaatatgaattgagaatttgtagtattaaacacaaaaaaaagacattccatcaggaatgtctaaagtgtgactatatgtttaaattttgatttaactaagaactagttttataattttaccaactagctttgcgcacaccaggaagttgtcccttgtgtgctaattctttaaagcgtaaacgtgacataccaaacttacgcatataaccatgtggtctaccatcatgtaaatcacggttatggtagtgagttgggtgagcatcaagcggtaattttgctaatgcttctacgtcaccagcttcttttaattcatagtatttcttgattaattcacgctgcttagcagccttaacgattttggatttttttgccatatatctttcctttcgaatatagagtataaaaaatagtttaattaagaagaaaaaaggactaatttgagctaacttaaagtaagtatattgtattaaattattaataatttgtcaaaaagaaagtattttaaaaagaattagtttaaaataagtaatgattgattaaagaagggaaaataagccgtgggtatttttaaaagaatacttcataatgaagacttgcgacagctaataatttatgtattaattggtgtgttaggattaggtgttgactttggaatttttgccattctaactcactttaagatgcaagtcgaagtagctaattttatttcatcatcttgtgggttgatcaacaactttttctggaatagttttcttaactttaaggttcacgataaattattagtaagatttatttcctattatttagtaggacaaattacaactttgtttacaactgtctgcctatttatttttgtaactcaacttggctataatcaattgattgtaaaggctgtttctacatttatcgctaccttgatccaatttgtaattaataagttacttacctttagaaaaattaaaactactaaaccaaaagtagacgttagaaagtaataagaaagactgttaaagtatgaaaaaattatcaattatagttccttgttataatgaagaggaatctgtaccacttttttatcccgcagtgaataaagtaatggatactattcctgatctagaaccagaatattggtttattaacgatggatcgaaggataataccctaaaagaaattaaagaactacgcaagaaggatccagagcatgtacactttgtttcattttcaagaaactttggtaaggaatccgctctttacgctggacttcaagcggcaactggagattatgtggttgtaatggatgttgacttacaagatcctcctaagttcttaccacaaatgtatgatctaattaaaacgggagaatacgactgtattggaacccgtagagtggatcgtaccggagaagctaaatttaagtccttcttaagcgatatgttttataaggtggttaataagatctctgatactgaaatcgtaccaggagctcgtgattatcgaatgatgactcgtcaaatggtagacgcagttttgaatatgcctgaatacaaccgtttttcaaaggggattttctcttgggttggatttaagaccaaatacttagactatcacaatgttgaacgtgttgctggtgaaagtgactggaacacttggaagttattcaaatatgccatggatgggattgccgacttttctcaggctccgcttaacttggctgtctggattggtacaggatcgtttatcttatcacttattggattgatagcagtgattatccgtcgtgtgctttacccagattcaagcatttttggttgggcttcaatggtatgcattatattgcttcttggtggtctacaacttctctgcattggtattttaggtaaatatattggtagggtatatattcaagttaagaatcgaccaatttatattattaaagagaaaaaataaacgtaataaaagaccgaagttcacgtggagcttcggtcttttttgataacaaaagttagtattctttaagttagacttgtttatgattgtacttcttccaaaaaaatccctcctgtatttaatttctaaaaaagcgtcgctgatcatactaacagaaaaaattttttctcgtaagtaatttttttggagattctaaatttgaaaagtgcgataatttgaacaagggagaatttacgaatgaaaaaattaacaaaagatatctggataaagattgctctatctcttctaggagttttggctgctattttggtctatgtacctaactatgctctagttgatcaagggctcaaaggtagatgtgctatcttttttattattgcgatagttttactttggctaccaatggagctaaagagcagtatttttgcacttaatttttactatgaattaggtttgattttgattattgtctttttcatgactaatcaaatggcaatgaattttactattggtctagtgattgctttgcttttactaacttggattggaatggtaatttttaaaaataatttagtcatgaagcaaaaaaatagtgagcttttaatcattagacttgtcatgatgctggttttagcatatttagcctatatcagcggttttgcagctcttatgggagctgagatctttacagtacaaggacaaacttggctacttattttgggttttgttctgtgtgtatattatctcgtcttagcaggaagtatttggcaaccatggtttagaagatggacttcttggatcatgattttagtagcagttgttttgcatatgttatttgcaagtgccacctctttaaatattatctttttgcctttaattggagaggttattttacttattctagcttggcggagtaacagaattttaatgaaaaagaaaaggatttcataattagctcttgtcagactgtatcgatccttgatagaattaattgtttaaaaatttaggagagatacaaaattatgaaatatgtttatttgtttttaccagcaatcggctggggacttatgcccttagttattgcaagtgtaaagaatagtacagtttataatcaaatcgttggtactgttgctgcttcatttatttttggcgcaattgtaatggcaatcatgcatccagcaatgagctggtcactcttcttgctttctgcattaggaggagcttgctgggtgattggtcaagttggtcaatatatttcctatgaaaaaattggtgtttctgaaactatgccaatttctaccgggttacaattaatcggggttcctcttgttggtgtgcttgcttttggtgagtggagcagtcctcaagctaagctatacggttttattggaatcttagttttgattattggggttgttttaacttcatttactgaccgtggaacaagcgaaggaaacaagtctaatcaagtaagtactattatcttgcttgttttaacttcacttggatatattacttcaagttctattccaaaggccttacatggaaacagcgtttctattttctttggtcaaacttttggtatgttagtagctgtatttatttatacattggttactaagaatttacatgtttggaaagaaaaatctacagttcaaagtggtggggcaggtattctttatgcaattgccgcattagcttacattctttctgttcaagataacggagttaacatggctttcgttatttctcaactttgtgtagtgatttctactttaggtggcttgattttcttacacgaaaagaaaactcgcaaaggcttgatctttaccattgcaggcctaattttaattattggcggtgcaatgttaactacattattctaaagaatgaaaaaaggcatcccacgtctgggatgccttctttgtatcaacttgtcctaattcttaaatcatttttagtattagaacacatttaattgtattagaactaaattaaaagtcaagttaaatacatagagctttttaacaaataaaaaagtatttagagttaaataacaagtaaagaaatatagaattcaataataaattatatgttatcgcttacagttgacatattgagtatagcgtgatattttcaaaatgggattggtcgaaattgtttaggaggacaatggatgctagcaattgaaaacaaccagttaaaggttgaaattaatgaggtcggcgctcaacttactcatgtagttgataagactacgaatgccgactatatctggaatgggagtgaatgggaaagacatgctccgattctttttccggcaatcggaaaatcgaatgacaataaatatattttaaatggaaaaatatatgaaatgaagcaacatggctttgcacgtgattatccttggacagttgtggacaagggggatgatagagtaagtttaactttaactgaaaatgaagaaactttaactgtttatccctttcactttagtctaatggttacttacacgttagaggctaaccaattaaaggtagagtttttagttaaaaataattcagaagaaacgatgtcttttggtcttggattccatccaggatttaatgttccgatcgctggagatgaattggaattttctgattatgaagtttcattaagtccagaagttacagaattaactcaattccaaattgatcctattccatttagaaatggtaaagttattccagtacctaaggcagaaaagagtacattacctttatcatattcagaatttgataatgggttgattattattaacaatcctggattaactggaattgtattatcgagtgcaaaatctgaccatcagatttctttaactttagaagattttccatatgtggcactttggacaatgacagatccagaagccaaattcttatgtatggagccttttgctggactacctgatgttaaaagtgacgaattaactgattggatgaaaaaagagggaaataacttcttagagccagatgaaagcacacatttttcaacgacaattactttaaaataatatagaaagagggaagcaataagttttcctctttttttactaattagttaagatttgtcataattaagttttaagaatgtaattttgctataatatccttgttttaagaaagtttgagaaagaatattatggataataagccccaagaacctattcactcaagagttgagttgaatagagaaaaacataataagaaaaaaaaggtccacattattattgggatagttttatttttgtttttaggacttggaatttatgcaagttccgtttatttaaaagcaaaaaatgcttttgataaaacttatgatcctaaaacggccgtcaagcaggatagcttttctggtaaagaaccttttaatattctgttgttagggacagatacaggagctttcggcagaaaagaagttcgtggaaactcggataccatgattttagtgaccgtgaatccggccaaaaagaaactttctttaatgtctattccgcgtgatacgatggcccggatgattggtacggacaattttagtgtgcataaaattaatgcggcttataatattggcggagcaaagatggcaatgcggaccacaagtaaagttctcaatgtgccaataaagtactatatttcgatgaatatgggcggcatgcggaagattgttgatggtgttggtggcgttacggtgacgccaccattgacctttacttatgatggctatacctttactaaaggaaaaacagttcacttaaatggtagtcaagctttagcttactctagaatgcgctatgatgatcctaagggagattacggtcgtcaattgagacagcgtgaggtcattatgtccgttttagagcacgcactatcctttaatactctcaaaaatttagattcaattttaggttcagtgtctactagcctgaggacaaacttaacttttgattcaatggttaagattagtaaaaactatcgtaaatgtactaataatatgtctagtgactacttacatggagtaggcgcaatgattggagacgcttcgtaccaagtaatgtctgatagagaattacaaagaacttcaaatattgtgagaaatgatcttgggttagattcgatggatattgataataatgaaacctatcaaaattcaatgaattctcaatttgattggaacagtggtgactctaatcaggtatactacatatatgatccgtatacggatgaattatggaatggagatagggcgtactaatggatgaatttgtctcgctagtaataggatatttcctcggaaatatcctttttgctatgattgttacaaaaatatttttgcataaagatccgactaaatacggttctggtaatccaggaacggctaatgtcggagcagtttttggtaaaaaatggggtattctgacttgcattggtgatttagccaaaactttagctgctttgttaattgtttactttatttatcatggtaatcgtctagatttgtcttttgcaggtcttggagtggttttaggacattctttcccattttggaatcattttaagggtggtaaaggagtagcagtcactgctttgtggattgtcttttttgattggagagcgggcttaattgctttattaattggcctatttttagtcattattatgaagaaccttactataccaccgttggtctatatgttaggattcagcatttttacttggattaattttggctgggaacaagggttaatctttttaattgctaccttaatcatgatttttcaatttagaaaagatattgtcgatttctttactggtaagggtaagcgtgtggatgtattagtcacaattaagaaaaagttagggatatacaaatgaaatcagtattgaaaaagacaatccagtggattttacttatagttttactgctgggaatattaattcaaaccttaggcttttggaattataatccgccaaccgttgctggccgaactaaaattggtttaatgattggtttagtagagctagctgtgatggtttggtatgggatgagctacggcaataaggaatacagttttaaggaatcagttaaaagttggcttgaaggagtaattactttagtcatcttttatcttgttttcgttatttctttaccgcaatttttctcagcttggaacttatggggaatcttctttcccgttttaacaagtacatcagccttatttagtgggattattatttctttattctttcaaccttttatttttaggctgcaaaataagttaagtactaagcaaaatgttttgttattaactacaattacaattttgatctttaccttaagtgcaggtaattcgcttttaactagctatagtatttttggtctctatttggtattgccttttgcttggggaatgcttatttcaaaaattactgtatctaaaaagttaatagctggtttaacagtggcaacagtaatcttacttcccgcagtttattatttcactattcaattaataccaattcaaactccacaagccgttgtcttcacccagatgaatatggcatggaatacgagcttgttaatgagtccatcatcgccagtaatgatcttatttgtcgtaactggcggattgctttttagaaaatggttggtagatgtatcacatagtgcattatctcttttaattcctgcaattatctttgggacaactgcttacggaatgactttatggaaggaaaagcttcaattattactggctcctgttagtaaaaaagtcacttttctcttaattttgtccttattgattgcaagttttattattaattttatttttaatagatttgttctttcaaacaagcatgtgcaaaactttctgaataaatttactggcacagatttaaatgatcttcttaatctattaaacagcggcttgaatttccttaagaagcataggccaataatatgtctctttgcatattttatggttgtaagtattattggtttctttacatttaagagtaatgttaacgttacgttgacttatatttttactaatagacttggcactgtcatcttgtccagtatttttcttctagcgtgttttgaagtcttttatgtacttaccaagcgcttctgggtagcaacaagtattccgactattttagggctaggaattgcgattgctaacggcattaaaatgagcttgagagaagagcccgtttatccaaccgaaattggtgaaattgttaattggaagaccttaattccaatgatggggacaaacaatttgatttatattttaattggattagctgccctaatcgttttaattgtctttttagaaaagaagtttccaattaacctcaagcgtaaaaaatcaagttgggtaaaattggttattagcctcttagttttaattacacctttgtggtttaacgatgaaaattcaccgatctattatatttcaaaaggttttgataatagtcctaactttagaaatccaccagatagtacaggtgctaacggttcaattctgacttttctagactttattaaagtaccaattatggataaaccaactaattattcagaaagctctataaaaaaagttgttgaaaaatatcagaatgaagcagtaagtattaataagacgagaaagaataaattaagcgatcaaacacttgtctttaatcttagcgaaagttttgttgatccaaaagaattcccaagtgttaagatttctaatgatgttcgagatccaattaaatatattcgaaagttgatgacaaccactacttctggccacatgcttagtgctggttatggtggcggaactggaaatatggaatatgaatccttaactggatttaacatgggagtattttctactgcaatcacgccatacacgcaagtgacatctcgttacaagttttatccaacaattgggatggactttaagtacagcagtgccttacatccattcaatggtacattctacggccgaattgataattatcgtcgttttaaatttaataaattcgcgtacttaggctcgaagtataagatttatgataaaaagactatcggaactaatccatatttatctgatgagacagcttatcaaaatggcttacgacaaattaatagtcaaaaagatggtcagtttatcaatttaatttcaatgcaaaaccacattccatatggtgattattactctccaaatgaatataaagaaaatgttagtggatctctaatttctgatgaaaatactaaaaatagttttgctgcctacactaaaggtattgaatacacagataaggctgtgaaaaagtttattaaacagattgataaaatcaacaagccaattacccttgtattctatggtgaccactacccagcaattattgatcagacacaattaaacaagtatccggtaaaattacatgcaacgaactactttatctattcaaataagtatgcccgtgagcatggtgctaagagtaaaatcaagccaaataaatatgtctcaacagcttcctttattccaatggctttagagcaaactaattcaaaagtaacagcttatcaagcgttgcttactaagatttatcaagaattacctgctgtcactattaactattctggagatgatggctttgaattaatcgatcaaaatggtaagcaagtttctgagaagaaattaactaagaaacaaaaagagttactaaaggattatcaattaattcaatatgatatgtctgcagggaaaggatacagcttaaagcttaagggcttttataaataagcagttgactaaatagacattctcccttatgatcataggtaataatagtagcaacttaattcagtgttcagagaactagcggttggtgtgagctaggcaggttaagtgagcgaagtacatggtggggtagtttccgtatcaactatatttaaggcgcattaggcgtaaacgtgggtggtaccacggctaataaagtaatttagtcgtccctagatttcgaaagaagtctagggacgtttttgttaggagaaaattttatggcaaaatttgatattttagaagatttaaaatggcgtggagctattaatcaagaaactgatgaagaaggcttgcgtaagtacttagcagaacatgacgatttggctctttactgtggaactgacccaactggagattcacttcacattggtcaccttattccattcatgattttgaagagattccaaatggcaggttatcacccagtaattttaattggtgggggaactggtgcaattggagacccatccggtcgaaagactgaacgtactcttcaaacagctgagcaagttaagcacaacgaagaaaagttaactgctcaaatgaagaagttatttggaactgaaaactttgaaattcgcaacaatgcggaatggcttggtaagatgaatttgcttgatttcttgcgtgactacggtaagttcttccaagttaacaacatgattaataaggatgttgttgctagtcgtctcgaaaacggaatttcatttactgaattttcttaccaaattttgcaagctattgatttctatcatttgaataaagataatggcgttcaaatgcaaattggtggtagtgaccaatggggtaacattactgccggaattgacttgattcacaagcttgacggttcagatcgtccagcatttggtttaactattccattaatgcttaaggctgatggtaccaagtttggtaagtctgctggtggagctgtgtggcttgatcctgaaaagacgagtccttacgaattctaccaattctggattaatcaagatgaccgcgatgtagttaaataccttaaatactttactttccttagtcgtgaagaaattgaagatttggctgaaaagactgaaaaagaaccttggaaacgtgctgctcaaaagagattagcagaagaagttaccaagtttgttcatggtgaagaaggattgaaagaagctcaaataattactgaagcattattctcaggtaatgttaagagtctgtcagttcctcaaattgaacaagctttgaagaatgctccaagtgctgaagcaacccatgaagctaagaatatcgtagaatttttggttgaaactaagattgaaccttctaagcgccaagcacgtgaagacgttaagaatggtgcgatttacgtaaacggcgaacgtcaagatgatattgactttatcatcgaaccagatagtgattttgatggaaaatatgtaattatccgtaagggtaagagaaagtatactctagttaaaattaaataataaataaaaattaaggactaggaatgtaaaaacgttcctggtcctttttgctataattaaattgatatctgccgttttagctcaggaggtagagcaccgccgtggtaaggaggaggtccccagttcaaatctgggaaacggcttagtgaataatttagtaacaaaaaaattctagggatggtcaaaaaggcgatccctttttataattgttataaatagtataaataatttatgaaagaagaattaatatgactcatgaacttacgctagatgaaattgcaaaatttcaacaagattatcaacaaaataagcaaaataaaattgctgaattggctgttgtgaataacggtgtgcaaaaagcaagtttcaacggtgagggtatccgtgatttaaatcgaactttctcaattgaaattccaactgataatgtgaccgaccaaaagcaatcaggtcgttgttggttgtttgcggctttgaatgttttacgtcataagtttgccaagcaatatcatacaaagaactttactttttcacaaagctatcttttcttctgggatcgaattgaaagagcaaatattttctttaatcatattctagaaactgcggataaacctgtggatgatcgtactgtacatttttacttacaagcacctgataccgatggtggacaatggcacatggctatttcattaattagaaaatatggcttggtaccaacttatgcacaagacgaaagttttacagctaataatacggcggcttttaatcaagcattgaatatgaaattacgtgaagatggattagttttacgcaaacttgctcaagccggtaaaaatgatgaaattgaacaaaaacgtcaagaatatttaagtgaaatttaccgtatggctgtaattgcttttggacaacctgtgcaaaagtttgatctagaatttaaagatgacgatggaaattacaagttagaccaaaatattaccccattagactttttccacaattattttgaagatgacttagatgattacgtagtactttttaatgctccagatcatgagtatgataagctttacgcttttccatttgaagataatgttgaaggcggtagcccagttagatttttgaatacaaagattgaaaatcttaaggaagccgcaattaaacagctaaaagatggggaaacaatctggtttggttgtgatgtaggcaagcaaagtgatcgtcaaaagggaattctagctgctaatttatatgaaactgatacgatttttggtattgaaactaagttaaataaaaaagaacgtcttcaaactggtgctagtggttcaactcatgcaatgacctttgtgggtgtggatgtagttgatggtaaacctcgtcagtggaaagtagaaaattcctggggaacaaaagttggcgataaaggctactttgtcatggatgatgaatggtttgatgaatacttatttaaagttgtagttaagaagcaatacctaccagagaaactagtgaaaatcgctgagggcgaagcaactcctgttccttgctgggattcaatggcttagtctaggggatcgacaatgaacatcgaattagttaaacaatttactaaagatcatctaaaaggtgaaaaaacaggacatgattactaccatggacaaagagtggcaaatttagccacaaaaatgtatctaagtgattatccagatgcacataaagacagcagaatagtagctattattcagacaggaagttatttacatgatacaatcgatgaaaaaatttgtgacaatcctgatgaagttatagacgaaatcaaagaattattgcctaagggtggctttacttctttagaaatagaagatattttatttactattcagcatatgtctttttcagctaatattgagcatcattatcaccttcctttgagtggacaatatgtgcaagatgctgatcggattgaaagtttaggtgcaattggaattgctagagcatttacttatggcggaaaacacggaaataagatttatgacccagaaattaagcctgagaagctaataagtcatgatcaatatcgcaatcatgtagaaaccacaattaatcatttctatgaaaaattatttgatctagaagacctaatgaatacgcctgctgctaaaaaagaagcacatcggagaactgaatatatgcgtgcgtttgttcaagaatttatggatgaatggaatgtgtaattgaagaaaaagagatttgtacccgtattgatacaaatctctttttggtatatattatattttatttttactaagctagtgaatcccaagcaggaagtggagttggcttgctttctgcaagtttcttttgatcttcagttaagaactcttttctaacaactacttcataaacaaattcatcaaaccacttatcgctcattgtgaagtaacctttacgaccagatttttcactccatgagttttcaactttccacttacggatttcacccttatctaagtcaacaccaactaaagtcatagcgtggctaacttcgccttcaccagtagccaatctttctgccttagtcatataagtatcaacatcaaataattcatcggtcttgtataattcagtatctaggtaaccagtcttacgatccatttctttcaagacatcattaccaaaccaaacactttcaccatcttttaattgcttaatagcagcgtcttttaagtattcgattggaacatttaagaaagtaatagggataccaccattaacattgtcttcaaatggaagagagtaaagtttgccatattcatgatctggagcattagttaagcaaacataatcattgaaattaatatcccaatacttattgaaaaattcaactggagttaagtttttatccaagtgaagttttttctcatcatcgcggtactctaagtcaaaagtcttagggggttcgccaacagcaattgcagtcatacggtagatttcgcttagaaattctttgcgtttcttttcaacttcttcagttttaccttcttgaactaatttgcgtaaaactaaagcatcttttctttctttacgagctagcgcatcagataaaccggctgtatgattagtattaaaactttcaggcattgcattggttgggacaacaccgtacttctttactaaggaagcagccattgcccattgaccaccatctgcaccagcaaaattcatatatgctttaactgtacgatcatctaatggcttatctgcagaatcaataattgcatcatagaaaatattagcacgttcaatcttatcccagaagaagttatatgcttgagataaggtgaagttcttagccttatattttttaccaaaatcatggcgtaaagtatttaaggtcgcaaataaccagcaacgacctgattgcatttggttggtaacattatcagtttctacttcgacagagaatacatcgtttagacggttagtaactgctggattaaatgaggcttctaacacaccagatcgcattgctgcgcgagaaactacttgattacgtgaattatcaaagtcactacggaattgatcaatttcttgtagggttaattcgtgagacatagattacactcctttaatttttttatcatgtttttcattatatttactatacagcaaatcacaagttaatacactaattttattgaatgaaagtggctttcatgagtatttaagggatgattctgaagtataatattgataacaatatcggaggaaagaactatgaaaaagaatatttttgtatcaggaattaccctaatgacaatgcttttagctgtaggttgtagtaataatgcaagccaatcgaacactaataatgaagctaaaagtactaagacgagccataaaaagagccacaaatctaaaaaacatacaactaagaaagataagactgatatagatactgataattcagaaactaccagctcagataaaaagactgataagagcagtgaaagttccaagagtagtaatagtgagaagaccagtcagaatgaatcagcaagctctaattcgtctaattcaaatgaatcagaaaaatcaaataattcaaatggctcatccaattcttcagcatctaatactcaaaataatagcggtcaaagtgccgcatcagctaatagctcttcagataccatgtttaacaagatggtttctaatactattaaagaaaacggctattcaagtagttatggaccagataattttacgttaattgatggtggtaatggacaatattctttagctgagaagtcaactggaacaattgttggtcattattctgtaaagaatggtgatctttacaagcaagatgtgattactggaaatgatgttaaggttaaataatggtttattatcagaaaatgacgcctgaaggctatcaagaaattaaagacgagatagcccgtttaaagaaagatcggccacggagaattaaaatcttacaagaagctcgtagtatgggagacttatcagaaaactctgaatatactacagctaagatggaattagggcatttacaaagccgtttgcgctatttagacaagcaattaagatattcagaaattattcaaaaagatgaaagtggaactattgatttaggatcaaatgttactttactttttgagggcgatgatgaggcagaagaatatcgtattgttgggagaatggaagcagatttagctaagggaaaaatttcctttgattcgcctttagggcaagccttaatgaagcaaaaagctggtgcaacagtaactgttgaagcaccagctggaagttatgatgttaaaattattgatgtagattaaaagacatctcgcttatgcgggatgcctttttcttaatctaaatatttattcaatattaattgtattttccttatcttcttcagttaattttggcaaggtaatggttaaaacgccattaacgtcttttgcggaaatttctttagagtcaacatcagggatgcggtaacttctttgaatgtgaccaacgcttctttcccggtgaagaacgttaccgttattattgtctaagttatcgaatgaatctcggctacctgaaacgtttaggacgccatctttatatgaaactttgatgtctttcttatccattcctggcatgtcaactttaacaatatagtccttatcagtttccgctacatcagattgcataatgttcttgatggaactgtcgtcaaaaaagtcttttggaaaactaaaccaatcgcttaattgatccatcatattatcgttattacgatttttcatcatttcgtttgccataataaaacttccttccattacgctctctacaatctctattgtagtaggtccgtagggaaagtaaaatatttagcacactaattagaacggtgctaataagaatgaaaaaataggatttagagtgcttctaaatcctatttttgatggttagtctaaatctttaccgttagattcaataactttcttataccagttaaatgaatccttctttgagcgttctagcgttccgtcacccttgtcattcttgtcaacatagatgaagccataacgcttgtccatttgacccgttccagctgaaactaagtctatgcatccccaaggaagataacccatcaagtcaacaccatctaacacaacggccttttccatttgttcaatgtgttttctcaagtaatcgattcgatatggatcatgaactgacccgtcagcttcacgtttgtcgtaagcaccgagaccattttcaacgataaatagtggcttgtggtagcggtcagttaggtggttaagagagattctcaaaccttctggatcaatttcccaaccccagtcactacgctctaaagtagggttttctacgatcgcttcttgtaagtcagttaattcatctggtttaactttcttacttgaaacagtagtggattgatagtatgagaagccaacgtagtctactgtaccttcttttaaggcaattttatcttcttcagtgatatctggacggtagccatttctttcaatgtaatcttcaacagcatttggatattcaccattaacgtggacatcagagaagaagtcacgtctttgttcaaacttatcagcaagtaaaacatcatctgatgatggagttagaggacgaacaggtgagtaattaatcatacaaccaatttgaaagtctggattaatcttgtggccttctttaactgctaaagcagaagcaactaattcatagtgggctgcttgatacatagcagcttctttttctttatcgcccattccgttcttaaacaagataccagagttagtagccattaagaagtcattgttaaaactagattgattatcaatttcgttgaaagtcatccagtatttaactttattcttgtaacgcttaaagcaaacacgggcaaagcgaacaaagtaatcaattaatttacggttagtaaaaccaccatattctttgactaagtgataaggaatttcaaagtgagaaagggtaattacaggttcaattccatacttatgacattcatcaaataagtcatcgtagaacttaagacctgcttcattaggttcttcttcatcgcctttaggaaaaattctagtccaagctattgaagtacgaaaagctttaaagcccatttcagccattaacttaatatcacccttgtagtgatggtaaaaatcaatggcctcatgattaggatagtttttaccaggaataacgccatcagtaatttcacgcggcttagtggctgatcctactgtcataacatccgctacagacattccctttccatcttcatcccatgcaccttcaagttggtgagcagcaacagcgccgccccataaaaagcccttaggcatagtgtatccagtcatattcaatacgtcctttctaaagtaagcgttttcgaaactcattctacaaattaaaaacttaattgtaaagcttaaaagtatagaattttatttttataataaaacagtgataattattgcaaacggtttcattatggagtattatacaggtgttgtctgaattgttcaggaacaatattaggaggacagatacaataatgaccaaaagagatcagagtttagaacaaaagaaacatgatatgagtgtgagatctataaattttagccgctatttaatgattcggtatttttctgcggcgttcttattcactaatctcttttggttagtttttgcaatttgttaccaaaatattgttgcttcgataatttcgggattattatttgttttattattaatagcttcagtagagcagataagtaagtggaacgtcagaaatactgacttaaaatttacaaaactgtattatcaactccagctaggtgcaaatgtaatctttgctatcagttgctatttaccgtttggaaagactctatttccttttatggctacaaacgatgtcgcaaatgtgatctttacaattttagttgttggaatattaggatctattttgatcttaagaagaattagcaacattcaaaatggtcgcgacaaatatgcaggagcaattaagacatttgaaagtaatagacagtaggacaaattgagggggatgtactatgtctgacattgcgcaaccatcatttaaagataaaatgatgaaggctttaggtaagttctcaggttcacgttttgtacgtgcaattatgggtgctggttattctattattgccttttctatcattggatctatgtttttggtcttaacagtattaccacaagttattactgctaagggatttgtagatttctataacaacactattggtcgttttagcaatatgtatactgttatatataatgcgaccatgggaatcattgcgattttctttgctggatcatttgcttataattatgctgatatttatcgtaaagaagagaacctattgctagatccactaaatgctgttttcttaactttgatgggtctgtttatcactgttccacaattagtttggaaaagtggtagtacgatttttataaatattctaaagaataataacgtagttgctggtggttatggggtatcaggatccggactaactagaattggggcaacaggtatctttactggtttagttgttgcttggttaacagttcaaatttatcgcttctgtattaaacataattggcggattaagatgccagcctctgttccatctggggttgctaactcattctcagctctaattccaggttttgttgttgcatttacaattggaattattgatattatcctcattgtattaggtactgatattttccaactattatacattccgttttcatttatttctgcaattgctgatacttggtggggatttttgattattatcttctttattcacttcttatggtggtttggtatccatggagctactattacatcaagcttttatcaggcaattgttttagcaaatatggcagataacgtaaaaggtggatttcatgtatttgctggggatccaattaatgcatttgttacgattggtgggtctggagcaactttaggtatggctatctttatcgcatttcttgctagatcaaagcaattgaaggaactggggaaacttgaattgatcccagcaatatttaatattaacgaacctttaattttcggtttaccaattgtttataatgtcggactatttgtaccgtttatttgtgctccacttgcttcaggagcagtagcttatgttgccattgctacacatatggtaccaaaaattattgttcaacaaccatggccaactccagttggattaagtggtatgattgctacagctagttggcaaggatttgttctttcagttgtctgtgcaatcgttgcatttttgatatggttcccattcattaagcactacgatagtcaattgcttaagaaggaacaagcagatgctactaaagcataattaaaaagtatagacttttaaaatcttcgtagtttaaaatataactatgaagatttttattttaaggacatagtaatgaaaaaatatgaattagttgcggataaaataaaagcttatatcaccaaaaacaaacttcatcatggagataaattaccaacaattaccgaattaatgaaagaatatcaagttggtaaatctactatcttacaggcgattactttgttaactcaacgaggaatagtttataaagttcaaggttctggcgtttttgtcagacctacagggcgagatggttatatgtcacttactgataacgccgggtttgctcatgttttaaaagatcctactactgaagtaattgagtttgctgagaaaaggccccctaaacctttatgtgactatctgcattctaatgaagtatgttactttataaaaagattgcgcagacaagaaggaaagccatttgttttagaagaatcgtattatcctaagagcattattccgtttatgagtaaggaaattgctgagggatcgatttttgactatatcaaggatggtttaaagaaagaaattcgtttctctgataaatatatgcgcgttagaaagttaagagccgatgaagcaaaatatctagaattagaagaaggagatccctgtttagaagtttatgatactttctatttagccaatgggacaccatttgatagttctaaattggtatacaattatcaaaactctaaattctatgatcaaagttctgatgatattatttaaaaaaatagtcctagtctcaaaatacaaattctttgagactaggactatttttattttggctcttttgcaaatcctgttgatggataattttaagaaggaattaagcagctaagaaatagctgtttgattccttttcttttataatattttcttcgagtctaattctaattaataaatgtttgaaatttctataaccataagcagtacgttcaatttgtttaatcttacggttaactccttcaagacaaccattagaataagttgaggtaataccgtttaggacaccagaataattacgtttaaaagttaatagagtttgatgcatttgtttaccaacattttgttttgaatgaagtagatggataactttcttttcatcgttatcctgaatagcagtcataaagtcctgcataacccaataagtattttctaaggtttggtcacaatctaaaccatctaagacaacatgttcctgtgttagacagtccttaaaatgccagtcgtaataaggagtagtcttattaagtttgtcatatttcatgagataaagcttccaaggggactttaaaagcttatattcacggcttcttttattaaattgcttcatgatttgaactctgaaaatattaaacgatctagtaagcatttgaaccatatgaaaacggtcaataactatctgagcatttggaaataattctctagcaactaaaggataataacaattaagatccatagttactgttttaaccattgcacgagctttaggagtgaacttgtaaaaatagcgtagaatatcaggtttgaaacgagttctaagaatttgaacaactttgtgagtatcaccatctagacaaataaagtgaagctttttgcctacgcccttaaattcatcaaaagctaagtgttcagggagatgatcaaaggcatcatagaacttagaagagcagacttctaatactctttgaaccgtgttgacagatacattatgttctctagcaatgctggtcattgaacgatcttcagtaagagcagaaagtatttttcgcttagaagtgttagagatatagcagcctttattaaccagattagattgagccatagatctttttaaacagtcattgcagagaacacgttgttttcttaatctgatagtaacgggcttactagcatcagcagtaatgaaacgaacgttagagacgtaatgaccgttatgcttaagattagtagaacgacaataaggacaagtaggctggatcagctcagctaaatatattttgtaaatcttaccgttaatattttcatttgaataatcagaaaaaataatgtttttatcttcaatatcaagagtaaatttaatataatcatttaaagaggacatagtttaaatctccatacacttaattgaattggtcgaagaaggattttaagtaagagaggactatggcctctttttttacgtaaaaaaatcctgtcgatagaatatcatagatattcatcaacaggaaaaattatacagcctttattttgtataggctaagacattatttttcatttgctttagttgtttttttgcgccttgctttaactgccagttataaaaccaggtaccgatattagaatgtttcttttcgtcatagctaagaacatcctctttaaaaacaatctgacaaccctgcggtgtatcggttaaatagtagccaattttaatatctattttaggtgacttaaaaactgaaacatattttttaccgaattcatattcagtgatttcggcttttacatttctttgttgatatgttgttcctgcagcaattttaacaggtaagtcattaccacgggattttttaattgcttgagtaagttgcctatctaggtaattaaagaaatcttttgattcgaagtttgcttgttctttgattgtaatcattttgtctgtctttctctatctattttgtcaaaaaaatagaacctagaaaaagctaggttctatcttgttttttagtctaaatcttttccatgggagacaataacttttttataccagttaaaggaatccttaggatatctctttaaagatccatttcctttgtcatcacgatcaacataaacaaagccatagcgttttttcatttcaccagtaccatttgagactaagtctattgctgaccacatggtataacccatcaaaggaataccatcttcattaactgcttcttccattgatttgatttgggcacgaagatagtcaattcgatagtcatcatgaactttatgatcttcagttaattcatcgccccaaccaagaccattttcaacgataaagaggggcttatggtatcgatcccaaaggtcatttaaggcaattcgtaatacatctgggtccgttgcccatccccaagcgttgtagtcaagataagggttcttaacgccacctgcggaaacattaccattagcttttgcgtctgcttcatgtgtagtaagaacattagaagtgtagcaagaaaagcttagaaagtctgctggataattttctattaactcatagtcttctggcttatcatcaagtttgatgccatcacgttcatattgttttaaacgatattcagggtaacgacctccagtttgaacatctgagtaaaagagcatctcttgtttagctttcataactaaaatttgatcagctgggtcagcagtataaggatagtaagcagagtaggcaagcatttgacctacttgattgttttgatcgatttcatgagctagcttaactactttactgcttgctacaaactgattatgagctccttgagcacgattttgttcactaccatcaattaatccgccgcccatataaggagccatgtccatagcattaatttcgttaaaggttagccagtatttaacttttcctttgtagtgattcattacaatatcagcataatgaacaaaaatgtcaatcatttttcggtctttccagcctccaaaacgattaactaaagataagggagtttcatagtgggagagagttactaaaggctcgatgccatatttagcacattcatcaaagaccttatcatagaaggctaagccttctttatttggttctttatcatcgccgtttggtaagatacgtgaccaatttaatgatagacggaacatattaaagcccatgtcagccatatatttaatatcttctttatagtggtgatagaagtctgttccctcatggcttggatagtaatagtcagctaaaggagctggttttgctccttcgggtagtttaaactcttttccccaaaccattggagtagatccagttttgccatcagcagttttccaggtgacttttcttggttcattagcagaaccattagttagtacatcaacggcgtttaatccttttccaccgtctttataaccaccttcatactggtttgcagcactagcaccgccccagtaaaagtctttaggcatagagtagttttttgtcatattttttcctttcttaatttgtttaaatttataaaaaaagttctagaattgctctagaacttttacttaaaagctatttgtctctaaaacgacataatttcgttcattgtagcgatttcggcttgttgaatattcaactggttgaccattgtttaaccagacaatttgttccagctctaagattggatcgtcttttttggcttgaagatactgttgatcccaatcatcagccttagtagccttaattttacgataggcaacgccaaatttaagtttcaaattatgatgaagataattatagatagaattatgtaatatatcttcatttaaatctggaactaagttaactggcataaatgtatgttccagaatcagaggtttaccttcaagccgtcttagacgacgaatattgtaaactggatcgctagattttaattttaagtaatgttgaacatcttcatttggaaattcaacattaaactcaatgatatcgctagtgacctcattagatcctagtagattagctaagccactaaaagcattcgctggtgaatcaaatttatcttgaattggaattgggcctaagacaaaagtgccgagaccagattctttatagactagtccttttctttgtagaccatctaaggccttcttaacggttaaacggcttacgtgtaattcttctgcaagtgttttttggtcaggaaggggagtttgaggtttatagactccatcttcaattcttttttgtagaattcgagcaacttttaagtattttgcttctgcagccattatttttcagccatttttttgtaaacagctactacttccttagctaaatcaataaaagtaatagctgtcattaagtggtcttgagcatgaaccatgtaaaggtcaacttttacatggttaccttgtgcttcttgggttaacatatcagtttgaacattgtgggcatttactaagccttcgtttgcttgcttaataaactcatcagccttttcaaagtcgccttttttagcagcttggattgcttgcatagcagcagcctttgcattaccagcttgcataataattcccattacaacttgcatgttatcgctattttcttgtgccataattttaattctcctagatagatagtatttttaaaataaaagatgctcctgacaattatttattttactatgtcagcaagcatctcccataaattatttttgttttaattcttgaattccttgatcaattgctgcatcacaatcaattggtaattgcagtagcatttgtccgtctacctcaagacctttagggacttggataatacctggaaaatgatagccatgatgagctttagtttcattatctaaataaatagaaacttgtccatctgcgctgacaccaattttaaagtgatgaccgttacgatcaaattcgttaacaatttttacttcgtcgttcatttaactatttatcgcccattaattcttgagcagtttcaagaacatgctcaccattcatcataccgtagtcttgcatgttaataactgctaatgggatgcctgcttcatcagtaatctttttaacactgtcttccatgtattgaacttgaggtccaagcattaatacatctgggtgttccttatcaatttcatcttgaatacctgatgctgcagtagcaaagatcttgtagtccttacctttttctttagctgcgttttgcatctttgatactaaaagtgaagttgacatacctgctgaacaagctaacataatagttttatctgccataataattatctcctttgtaaatctaattaagtgtttttcagtgtttgagtgttgatctataaattaaatgtatgcactttcatcattgaaagcatttacattatagcacgattttgatcataagtgttagttaatagctgaaaaaattatttaccttcagcttcgtccttcttaagcgttgcagcttctctttggactaagatcttgtcgtactttctagcaaatggccagtagatcaaagttgaaataactaatgtacatgcttgccaaattgccatcttccagccaccaattaggaaaccggagataacagctggcattgtccacggacaagcaaaaccattaagagggggaacaataccagttctaattacgaagtaagttgagatagcaactacaactggtgttaagaagaatggaattgctaagaatgggttcataacaataggtaaaccgaataggaatggttcgttaatgttaaagataccaggaactaattcaactttaccgattgaacgtaattgtgctgatttagcagcaattaaaataaagataattaaaccaatagtgatacctgaaccagtcaagttaataaagttgttgtagaattcgttagtaacaacgtgagcaccattggcaatggttaatttaccagctttgtacaattgagcattatcaaaagagttagcttgaagcatagggccagcaagagaaccaacaattaaaccaccgtgaacaccaaagaaccagaagaatggtactaagaatccaatagcgatggcaccaccaagtgaatcagagataccttgaagtggaatttgaagagtttggtaggtccattgtaagaagtctgaaccagtagttaacttaaagcctgcgtaaataagcatagtaccaattaagataattcctgatggaatcatagcagtaaattggttagaaacagcagctggaacttgttcaggtaacttaatagtccagccctttttcataatagctgagtaaatccagccgactaacaaaccaacaatgattgcggcgatcattccgtcgccaccaagccaggtaatgttgaagacacctgtaactggtgattctaggaatgtttgtaaagcgtgtggtaacttatcaatattttcagttactgcttttgcactcattccaccgtcaatacctttagccatggcattctttaatggactgtcaatagttaaagtttgaagcattaagaatgcagctaatgaagtaagaccgggtgctagtggttcatagccttcatttttaacataaatataggcaataccaactgctgcccacatagccatgatactaaaagtagtagtgtaggcttggttgaagaatgcaccccaaccggaagcattaattgcattagctacggctggaataggaatatttcctaaaattaagaaaatagatccaataaggataaatggtaaagtataaatcataccattttgtaaggcttggatagccttagtattaacaaatttcattactggaggcagtatgcgtttattaacaaacacactaaagcctgattgtttttgctcgctcattatatttcgtctccattatcttttaatactttttggaaccaataaaatgatttctttggaacacgttttaaatcttttaagtcatgatttgaacggttgacataaacagcaccgtaacgcttttccatatcggcatgtgaacttggaatatcgattaatccccaacctagataacctaaaactttagctccatctaagaacatggcatccttcatagccttaatatgttcctcatggtaagcaatacgttcatcatcttcgatcatatgctcactatcccaagtttcttttaagccgattccgttttcaattgggaagactggaatcttgtaatggttgtacatagtggtaatagcgtttctaaaaccaagtggatcaattgtccagccccaagcatttgtcttgagatacttgttttctacaccgccataattcatgtaacggttaggagcaacgtcggcaggaattttatcagctgacactgtccaagaagaatagtaactaaaagctaaaaagtcagcctttgcttttttcatttcttctttatcctctttagttatatccaaattaatgttgtggtttttagcatattgcagtacttccggtgaataaccgcggccagtatctgcatcataaatattgaaattcaaaaattcttgaatttgttttgctgcccaaacatcggtagattttgaagtttcaggataaatttgttggaaggcaagcattccgccgatttttacatcatcatatttttcatggatgtaattagccaatcgaatatgactgatcatggtgtggtgaaagatggtatacatatcatctaaagttttgtcacctttttcgtaaccagagatgttaaatacttcgtcttggaagtaaagattatgttcattgaaaacaatccagtatttaactcggtctgaaaaatgatcaatcatctttttgccgaatctaacaaaagcatcaacaacatggcgtgacataaaaccgttgtattcttttgctaggtgtaggggcatgtcaaagtgataaagacaaatcattggctcgattccgcgatcaagcatggcatctactaatttgtcataaaattcaattcctttaggattaaaatccccgtctccttcgggacaaactcttgaccatgaaatttgaatacgatacatattcatattcatttctttcattaggtctaaatcctcatcataacgatggtattcatcaatcgcggtgtgccagtctgtagtattttctgtagcaggtcgtacatcgtaaactgataagcctttaccgtcttcatcccaggcaccttcagtttgcatacttgaaaccgaattgccccagaagaagtctttaggcattttgtgcttattcataatattccctctttgcaatcgcttacatattttacatgtataaatataaacttattttgaggaaaagtaaagcactttcatataaaaatatatacttttgtttaattagataacaaaaaaggactgggatagtttcctcagtcctttttcatgatgctttcaaacacatttatttaataataaaaaagtgtctatataaaatttaatgctctttttcaaaatctgcaaccgctccacgcaaatttgcttcattttttaatgtacatatatccaaaattggtttcacggtctcgatatccatcttatttcttaatttagcaatttcatcgtcgagtaggggaactaattctggattttgtgaaattccaccaccaataataattttttcaggatcaaaactgtgttgaatattaaaaattgctacagcaagagcatggaggagctttccccgttcttcttgagcaactgggtcatcagtgtcagcaagttcaaaaacagtcttaccatcaaaatcttttccagtttttttattgtagcgcttggccatggtaacaggtgaagctagctcacttaactgcttaccatcaataatcataaaaccaaattcaccgccatagagatgtgcaccatgccagatttgattgttaataatgatacttcccccaacgccggtaccaataactaaaaatgccatactactgcatcctttagctgctccgtcagcgatttcggcaagagctgcgcagtttgcatcattttcgatacttactggcaaaccaaatcttttttctaattcaggtacgattttaaagttgtgaatataaggtagggcacttgctccctcaattactccggtagctttattaacagcaccaggagaagaaattgctacaccatcaattttatgatcggcttttatttcattaactgcatcagtcaattcctcataaaaagtatctaaattatctggtgtatcaatcgtaaatatcatttttaatttttgatttatccaggtagcgattttaatagttgtgccgccaatatcaattgcgattaagttcattagtattacctctctttttatcttatctttcatgttaatcatcaacgtaagcgctgtcaataagtatatatttttcctgaagtataactaatagtaaatgctttgctataattgaaaataattgatataaaggggaaaagacatgaatacaccatcgtccagacaaggaaatttgactagatatattgtttatttggtcttatatttaattgtaattggagttaaaaaattagctctgttaaatgatcatgtaaataaaatagggtacttttttttcttactttgtgccttgtttactttatatttttatattcgacaatttaatcgagaacaacgattttttgaaaaaaagcccacgatgcctttattagcagattatggatttatagttggtgtatctattctggtgattttaggacgtgtttttgtttcctatcttcaagctaaaggaagcgtgcccttaatgtcttttcaaataatttatcaaaaggctgaatgtaatcttttattttggtttcttatattttcgactggtcttttgctaccagcaatgcaagtatatttaacaacaggttttttctttaattatgggtttagagcacagaatatggttagtggtatagttggcattatgtgctcaggctttttctatggaatacttaattttcaaacttcatttagtttatttattctcaatagtctttacgggatgctttttgcttggtcttacttatattcacaaagaatcatgatgccaatttatttagcaatcctaaatggaatttttatggtgattttagcctaacaaaaaacgaggaacttcataaagttcctcgttttttaatataagcggatagcgtgaatcgaacccgcatcttcagcttgggaagctgacattttaccattaaactatacccgcataagcaaaatgattatatcattttgctaacgatgtggcaactgatgtctgtctaggttatattctgaccggtcaagtagagaagtaaagttttgaaagagccaacgacgtaattcagatggctttaacactaagggcattctttcatgaactggaagcacagtatcattagaagcagtagtgaccattgaaaagtcatcccctttataaataccagcaattaatgccatcggttcatcttttgcagtaaaagatgagtgttcatgataggttttgttatttgatgcaaggtaagtttgcttactactttcccagaattcattagctaaaataatgcaccgctggcgagcaaatgaatcatcccacattgatggtttttcttcataaaaacgctctacccgagcattataaattactcgattctttttaaatggacttggatagccccatttcttttcaactaactttagttcgtcatcgctatatagcataactaaagatggagatttaggataaatttgagtaacagattcaaatttgtcttcaatgttttttgatacaactagtggtaattctaaatcagtttttagatatgtcttaatttctttaagcgatggcatttcataatgactacacatctctattcatcctttctttatgtaatttttctctcaatttaattttagcaacttttaggtaagtttaaacaaataaggatttttgctagaattggaggtaaagctaaagattacagatatattggagaaaaaatatgacaaaggaaattttattaactggagatagaccaaccggaaaacttcatattggtcactatattggctccttaaaaaaccgtgtaaaattacaaaatgaaggtaaatatgacccttatattatgattgcggacactcaagcactaactgataatgctagagatcctgaaaaaattaagaatagcttaattcaagtagctttggactacttagctgttggactagatcctgaaaagtctactatctatgtgcaatcacaaatccctgctctttttgaattaactgcttattacatggatttggtaacagttgcacgtctagaaagaaatccaactgttaaaactgaaattaagcaaaagaattttaaagattcaattccagttggtttcttaaactacccagtttctcaggcagcagacattactgcttttaaagcaacaataattccagttggggatgatcaagaaccaatgcttgaacaaactagagaaattgttcgtacttttaatagagtttataacactgatattttagttgaaccaaagggttacttcccaccaaagggacaaggtagacttccaggtttagatggaaatgcaaaaatgtctaaatcacttggaaatgcaatttacttgtccgatgatgcaaagactgtacaaaagaaagttatgtcaatgtacacggatccaaaccatattcatgttgaagatcctggtcaagtagagggtaatactgtctttacttatcttgatgtttttgcaccagataaagataaggtggctgaacttaaggaacaatatcaaaaaggtggcttaggggacgttaaaattaaacgctacttgaataaggttcttgaagaagaacttgggccaattagagagcgtagagagaagtttgctcaagatccagatgctgtatacgaaatgttactagagggatcaaagaaggcaaatgaagttgctaaccaaactttacaagaagttagagaagcaattggtttaaattattttgataggttaaataaataatttaaagagggtaagactgatgacaagagacaggattccgtggaagcaatattttatgatgcaggcgttagttattgcacagcgctcaacttgtgaccgagccctagtgggaagtgtgttggtcaaggacgaccggatgattgccactggttataatggaagtgtttctggacaacctcattgtgatgacgttggtcacttaatggttgatggacactgtgttagaactattcactcagaaatgaatgccttaattcagtgtgctaaaaatggtatttcaactgaaggtactgaaatctacgtgacttattttccttgctttaattgcagcaaatgcttagttcaggctggtattaagaaaattaactattattatgattatcatgataatccgttagcactcaagttactgcgtgaaaagggtgtggcgattgaacaagtaacgctagatcataaatatgttcaaagcttagctgagaggttagagaagacggataatgaaaaataagtttatcagttttggaatactcctaatttcttttttactatttactgctagtacaacttcttttgttagtgatctgcaaaatttatttaataaccaaactaaagaattagtaactcaaaaaaataaagagtatcaaaaaacaaaaaataaacctgagattcggcttttaagtctaaaaaatagtaatgatataaataaaattaggccgatgaaaaatcaggtaattattgtagctgcattacaaaataaaagaaaaaatgttcaaattcttgttggtaaaaattaccaagatgttttgacacaaaataagtgtagcaacattattcgatatgcaggcgataaattaagaagtgagaaaaaatcaagcttcaactcaggaattcgattagtttttaatgcctgtgcaactttaattgtccaaaaagataagttatcttatgataaaaattctttgacgcaagaagagttacaaaaaattgatcatccacaaagtgtaagtttagtttggggattagtgattgcagctttaattagttttggattagttttattcaaaagcacgcgaaagccacattagggcttgactaaaagctagttagccgttaaagtatcaatagaaattaaatattagagcaaataaactgttaggtgagactcctacgtgaacacatgctgtcgcccagcaacatccagagatgccaacgggtcaaacagggatcgtcgatataaggccctccccagccagctagttatatttttataaccttacgtcacgtagtgttaaaactgaacgacgagtataaaaatcgcttggatttaagccgatgcagtttttgcatcggctttttgtttgtttgctaggttcttaagaaaggatgttgaagatgttaaaaatcaacacttccggcaaaagacatactacagacaccaagctggtgcgccggattgcatgcgaagataaatttgcaacactgcaacgattaaaaacctcaattagtggccttcaaactaaagatgcgaggcaacgcttagcaaaaaatggtcctaacgaaattgtaaataaacctaaaaatactagacttcaatttttatgtgaagcatttatgacgccttttacaagtattcttttaggcttagcaattgtatctattatgcttaactataaattaaaagttcataatttagatacacctgttttaattattttagttttagctatttctggaatattaagtttcattcaaaatatcaaaattagagcggctattcaaaatttactacataaaatatcacccactactaaagttatgcgcgactgcatgccacaagagttggcaactaaagagttagtggctggggatattatcttgttacaagctggagaagtggttccggcagatgtaagaattttaaagaataataatataatttgttcagccgatttctttatggatgaagataatccagtatataagagtgaaattacttctttaggtcagagaaacaatcatggttatgtagactatgccaatattttatacgcaggtaccagaattatctctggttctggagttggagtagtatttgcgactggaaaagagactatttttggaaaattatctcaaaatatttccaagatggaattaaagaagcacgtgtttaatttagataccagaaatttaacaagagtatttttaattctagctgcagttattgttcctttgtttttagtaattagtagtatgatgcatggcaactgggaaaatactttagtatttgctcttgcagtagttgtcggattaacctctgatgcagttcctatttctatcactagccaattactaaaaaattcaattcaccatccgagtaatagcatggtaatgaaaaaacaaaatcaatctaactaggaatttctaaaaagaaattccttttttggtacacaaatttatgtaggcatgctatgttatactagcagttaaaagacttatgagaggaagaataaagatggctgaaaagaaaactttctatattactacacctatttactatccatctggaaaattaactatcggtaatgcatacactactattgctgctgataccatgactcgttataaaaaatctcgcggttttgatacattcttcttaactggaactgatgaacatggacttaagattgagcaaaaagctgaagcacaaggaattaaaccacaagaatttgtagataaaatggctgattcctataaggacctatggaaaatgttagacgtttcctatgatcgcttcattagaacaactgatgaagatcacgttaaagctgtacaaaagatttttgaaagattattaaaacaaggagatatttacttaggtgagtacactggttggtattctgtagaagatgaagaatacttcactgaatcacaacttgctgaagtatataaagatgatgatggcaatgtgattggcggaaaggctccatcaggacatgaagtacgtttagttaaggaaccatcatacttcttcagaatgagtaaatatgctgatcgcttacttcaatactacaaggatcacccagactttattttgcctcactctcgtgagaaagaaatggtaaataactttattaagccaggcttagaagacttatctgtcactcgtacgactgttgattggggaattcctgtgcctagtgatcctaagcatgttgtttatgtttggattgatgctctttctaactatattactgctcttggatatggttcagataatgatgcattatttaagaaatattggccagctgacgtacatttagttggtaaggaaattgttcgcttccacactatttattggccaattatgttaatggcacttgatcttcctcttccaaagcaaatctttgggcatggctgggtattaatgagagacggtaaaatgtctaaatcaaagggtaatgccgtttacccagaaatgattgttaaacgttatggcttagatgctcttcgttattacttgatgcgtgcaattccatttggttcagatggtatttttactccggaagattttgttgaaagagttaactttgatttggctaatgacttaggtaacttgttaaatagaactgtttcaatgattaatcaatatcaagatggccaagttgctccagttgcttcagaacaggatgaatttgcaaaagatttaattaaaacagctaatgaaacaattgctgaatatcaaaaacaaatggatgccctccacttctctcaagctttagatagtgtttggaagctcatttctcgtgcaaataaatatattgatgaaactacaccttggacgttaaacaaagagggcaagagtgaagaactatctaaagtaatgactaacttggctgaaagtttacgtttaattgcaattttaattgcaccagttatgacgcagagcccagttaagatgtttgaacaactcggacttgactggaagaatgatgatcaaaagaaacttgattttggcggctttgactggaacattaaggtaacagaaaagccgacgccaatcttcccacgacttaaaaatgatgttgaagttaagtacattaaggaagaaatgaagaaggctaagccaaagaagaagactagaagtcaacaaaaagaagaaaaacacattacaattgatgattttgacaaagtcaaaattcaagtaggtcaaattttatccgttgagccagtaaagggatcaagtaaattattaatgtttaaacttgattttggtgatggaaacgaacgtcaaattttaagtggtattcgtaagttttatccagatgcaagtgaacttttagataaaaaggtccttgcagttactaacttaaagccacgtaagatgctaggacatgaaagtcaaggtatgcttttatctagtgaaaaggatggcaaggttaagttagctattgttggcgatgaacatgaggttggagctgaattaggctaatggagatttttgattcgcatacacacttaaatgatgcatcttttcgcggaaaagaagacatttatcttgaacgagctaaagaattaggtgttgtgaaaagtgcggttgctggacaagatcctgaatttaacgaacgtgcgattgacttgagtcaaagattcgataacttatatgctattgttggctattgcccggatgttgctaaagactatgatcaaaaagctgaggataagctagttgagcaactaaaagaacctaaaactgtcgcgttaggagaaattggactagattattattgggatgaatccccgagagaggtacaacgcaaagtttttgcgcgacaacttgatttggctcatagtttgaaaatgcctgttaatattcatactcgagatgcttttgaagatacttatcaagttttgaaagatagtcatgtcggtgaatatggtgggataattcataatttcaatggtgatccggaatggctcaataagtttcttgacttagggatgatggtttcattttctggtgtggtttcttttactaaagcagttgatgttcatgcttcagctaaggttgtgccgtgggacaaatttttaattgaaactgatgctccatatttaacaccgaagccataccgtggaaaacaaaatgaaacaggatatgtgcgttatgtagctgaagcaattgccgatttgcgtggaagctctgttgaagaagtagccaagcatacatttgagaatacgatgagggcatatggaatcagaaaataaaaaacaatttaatgctgtaatagttgttgaaggtcgagatgataccaaacgtctaaaacaattttttcctggaattgaaactattgaaaccaatggttcagaggtatctgaacaaactttagctgaaataaagaaactttcgcaaactagagaaataattatttttactgacccagattataatggcgaaaggattcgacgtttagttacccaagcagctcctcaggctaagcaagcttttattacacgcaaagaaggagaaccaactaagcgtggaaatagtttaggagttgaacacgtttcaaaagaagctttgattcgtgctttaagtgatttgcatgaagttaaaccgatagaaagtgatatcactaaggaaaagtacgatgagttaggcttaggaatgagctcgggtgctcgtcttttacgtgagaaggttgggattaagctaggaattggatatggaaatagtaaacaattttataaacgcttaaagatgtttggaattacttatgatgaattaaagagggcagttgaagatgtcaaatagtatgccgattgcaagtccagttagaactcaagcaattgttaatcgctattttatgcatgcgaaaaagaatttaggtcaaaactttttagtagatttaccagcaattaaaggaattgttgaagcagcagatattcagccaggagaccaagttattgaaattggacctggaattggttcattaactgaacaacttcttttagctggagccaaagttttggcttatgaggttgatcaagatttaccagaaatcttaaacaatgaattgccacaaaaaattgatggtgaagaattgaaagatcggtttaagttagtaatgaaagatgtattgaaagctaactttgtagaggataatgatggctttcttgatttaagtaaatcagttaagattgttgctaatttaccttactacattacaactccaattatttttaatctgattaagagtgatttagatttttcaagtttaaccttaatgatgcaaaaagaagttgctgaacggttagttgctaagcctaaaacaaaggaatatggtcccttgtctattgcagtgcaaagccggatgaatgttcgcttagccgaagaagtaaagagcacatctttcatgccaagacctaaagttgattccgcggttgttgtcttaacgccacttcttgaaaagcctgacattaatgattatgcattcttcgatcatgtagtgaaaatgtgttttgctcaacgtcgtaaaactttagctaataatttgaagactttaattaaagataaagatgaacgcgagaaattaattaatgatctagggttagatgttagagttcgtccggaagaattaactctaaatcaatttgttcagttggcacatcttctaaaagatcggcaagcataaaacggttacaaattacagacttgaaaaaatattaaatttttgataaaatgaatccaagcaaaggagtgacgtccagtgccaacaacactaatggcaattaaacaaagtttggattctcatttgggtgaaaacttagtagtagtagctcaagcaggaagaaaaaaagtaacccgtcgtaaaggtagattaactaagacttatcgggctgtatttgttgtagatcttgaccaagatcaaaataattttgaacgagtatcttatagttataccgatttattaaccaaaaacattgaacttgagtttgatgaaatgtagtcgacaatagaatattacgaacaatcactagtatttcacttaaaatgctagtgatttttctttatatagagtatatttaaacgtagaaatctatttaatgtttaggaaggtaaaagcatgaaacgttcagaaagattagttgatatggttaagtatcttttggctcgccctcatactttgattgcattaccattttttgcagatcgctatggtgcagcaaaatcttcaatttcagaagatttggcaattttacgtcaaactttagccaacgatcaaaatggaattttagaaactgtagcgggagcagcaggtggagtaagatacattccttttgtaggaaaaaaagaagctacagactatcttcatgatttagctgaccgtattgaagatcctgatcgtattttacccggtaattttgtttacttatccgatattttaggttcgccgcaagatttacgtcaaattggacaactgattgctaccaaatatgcctacagtaatattgactatgtaatgacgattgagactaaaggaattgctcttgcacaagcagtaagtcgtttcttaaatgtgccatttgtaatggttagaagacgtcctaaaattactgaaggatcaacaatttcagttaattatgttgcttcttcaagtgaacgagttgaaaaaatggagttggccaaaagactcctcccagaaggaagtaatgtactaattgtcgatgacttcatgaaaggtggaggcactttaactgggatggaagaactagttaaagaatttaaaggtactgttgccggtatgtgtgtactttgcgaaacaaagtatgcctctcaaaaagtagttgatgactaccaatctttaattaaaatcactgaagttgacagggataagaaactaatcaaagtacgaccaggtaatttcttagagcagacagacttcaatcgtttcccaaaatgatatactgatagatagcttaaatacaatattgaggggatattaaattcatgaataaatatgttgttatcttagctgctggaaaaggtacccgtatgaagtcaaaactttacaaggtattacataaggtttgcggaaaaacgatggtagaacatgtcgttgaggcagcaaagggaactaatccagataagattatcactgttgttggtaatggcgcagagagtgttaaagatgtattagcaggtcagtcagaatttgcttttcaagaaaagcaattaggaactggagatgcagttttagcagcaaatgatctattagagaatttagagggatcaactttagttgctactggggatactccattatttacagccgaaacctttaataacttatttaaaaaacacgaagagagcggaaatagtgcaactgttttgaccgcaaaagctccaaatccatttggctatggacgtatcattcgtgacgaagatggaaatgttctgagaattgttgaacaaaaagatggtactccagaagagttagctgttgatgaaattaatactggtgttttttgttttgacaataaagaattatttaaagctctaaaacaagtaggtaacgataacgcgcaaggtgaatactatctaactgatgttttagaaattatgcgcaaggctggtcacaaggttggtgcatatgaaatgccagactttagtgaaagtctaggggttaacgaccgaatagctcttgctcaagcaactaaaattatgcaaagaagaatcaatgaggaacacatgagaaatggtgtatcatttattgatcctgatactgcatatattgatagcgatgttaaaattggcaacgatactgttatcgaaggaaatgttgttattaagggtaaaaccgaaattggtagtaactgctatattactaatagttcaagaatcattgactctaagatcggcaacaatgtaactatcacttcttcaactcttcaagaagctcaaatggatgataatactgacattggtcctaactcacaccttcgtccaaaggccgtaattcgcaaaggtgcacatattggtaactttgttgaaattaagaaggctgaaattggagaaaataccaaggtaggacacttaacttatgttggagatgcaactttaggtaaagatattaatattggctgcggaactattttctctaactacgatggcgttaagaagttccatactaatgttggtgatcattcattcattggtgcaggtgctacgattattgctccagttaatattgctgatcatgcatttgttgcagcagattctacaattactaaagatgttgagaagtacgatatggcaattgctagaggtagacaaactaataaaccagattattggcacaaattacctttggcaaaagacaaagaatgggaataaatttaaaagaagttgttaaatacaacttctttttttgctatttacaagcgtaacaagcatttttttgctattattaaatgtggaattgtaatttttcggtggaggaaattatgtctcaattagacaaagaaattaaaatttttgcgctcaactctaataagcctttagcagaaaaaattgctgataaggtgggagttaagcttggtaagtctgatgttaaacgtttcagcgatggtgaaattcaaattaacatcgatgaatcagttcgtggtaaagatgtttatttagtgcaatcaacttcagctccagtaaatgataatttaatggaattgttaatcatgattgatgctgttaagcgtgcttcggctagaagtgttaacttagtaatgccttactacggatatgcacgtcaagatagaaagacccgtgcacgtgaaccaattacagctaagttagtagctgatatgttacaaaaagctggtgctgatcgagtactttcacttgatttacatgccccacaaattcaaggattctttgatatccctgttgataatttgatgggtgcacctcttcttgcggactacttcttaggccatgatttagaaaaagatgctgttgtagtttcacctgatcatggtggtgtaactagagcaagaaagctagcagaattccttaagactccaattgcaattgttgacaagcgccgtccaaaggcaaatgttgctgaagttatgaacattattggagatgtaaaaggcaagcgtgccattattattgatgatatgatcgatactgctggtactattactttagcatctcaagctttaatggatgctggtgcaactgaagtttatgcttcagctacccatgctgttttatcaggtcccgcaattgaacgtttgaataattcaccaattaagaaattgatcttaactgattcaattaaccaacctgaagaaaaagatttatctaaggctgaaattgtttctgttggaccattaatgggtgaagcaattaaattgattcaagaacataaaccagttagtccactatttaatactcgttttcaatcacataattaagtaataaaaaccaatatctatctacttaggtattggtttttttgtcctataagagctatacctttattttaaaaatagaaaaagcgtttacatatctcggataattaaggtagtattaaactatacagttttgaagaaggaactatgagaatatgactactttatctgatgtagcaaaaaaagctagtgtatctaagatgacagtatcgcgggttattaatcatccgcaacaggtgacgccagaattaagaaaaattgtggaaaaagcaatggagcaattgaattatcatcccaattcaattgcgagtgctttagctcataatcggactaatgtggttaaattggtaattttagaagatattgatacaaccgagccatactatatgaatctactttttgggattgctaaaggactaagcaaaaaacactacgcaattcaattagccacagacaggaatgttggcggaggagacggctatattataactggtgggcgagcaacggatgcagaatggttagatcaattagataaaccttttgttttatttggagaaaatcgttatggctatgattttattgatacagataacaaattaggtgaacagctggctacacagtatgcacttaataaaaattatcaatcaattgttttcattggaattgatgaaaaagagccttttgaatattcaagggaagccggctatatcaatacacttcagaaacataatatgattccaaaaatttttcgaatccaaaaccatagtagtctggctgaaaaattaattattgataattggagaaaatttgcaccgaatacatgctttatttgtgctagtgatcgaattgcagtcggagtagtacgagctatccaaagaaagaatggaaatattcctcgggattttggtgtgattggttttgacggagtctttttagatcaagtctcaaatcccaaactcactaccgttaagcaaaatttatttaagctcggtgagcttttagctgggatgattctgcaaaaaattaaacaagatggagcccagcagggtgaagtcttgattgaactggaactaataaaaagtgaatctacaagaaagtaagaagctggctaaacagcttctttttttgataccggtaacagataaaatttattgtaagcgcttataataattgcttaaaataaaattcatggaggatgtgtattatgagacattggtatgatcaagcaattatttatcaaatatatcctaagtcttttcaagattctaataatgacggtattggtgacttaaatggaataagaaagagaataccgtatttaaaggagttaggaatcaatgctgtttggctaaatccaatttttgtttctccacaagtggataatggctatgatgtatcaaattattttgctattgatccaaagatgggaacaatggaggatatggacaacttaattaaagagatgcatgaggctggtattcatgtaattatggactttgtattaaaccatacttctgatcagcatccctggtttcaagatgctataaaaaatccagaaagtatatatcgtgactattatatttttgctggagaaaacaatcagcgtccaaataattggggaagttttttcggaggaagtgtttgggaaaaggatcctgcaggaactggacaattttatttccatctttttgataaaagaatgcctgatttgaattggaagaatcccgaagttagacatgcaatgaccgagattgcaaaatattggttggaaaagggtattgatggattaagactggatgcctttattcatattgcaaaagccgatctaagacagaattttccggttaatagtaaagatgaagagccagtaattgcagaaccattttttgctaatttaccacaagttcaaaaatggatgcgactgttttgtgaggaaataaagcaagattatcctgatgcattacttttaggagaagcagcaagtgcaaatgtgaatttggctgtggattatacaaataagaataatcatttaatggatagcgtaattacttttagatattttactgaagatcaaagtaagatcgatcctagttttttgagtaattatcaacctaagcccttagattgggttaaatttaaacaaaatcagactatttggcaacagaccttaagtggaatttctaaacctactctttattggaataatcatgatatggcgaggctggcaactaggattgctaaaaatgatattcaagcaagaagtttagcaatgctgatgtacttacagtgcggtattccaatcatttattatggtgaagagctggggatgaaaaatttacagtttgaagatataaatgattttaaagatgatactgtaaaagagtttgtgacgagcgcagaaaaagcaggtaagacttcaaaagaagcattgttaatggcaagcaaaacccataagcttcctgctcgaggtccaatgccatgggataacgaaagaaataatggctttacagagaaagagccttggattaaaggcaggaagcttgataaggtaaatgtagctgatgaaatagcagatgatagtagtatgtttaacttttacaaaaagcttattagcttgaagaaagaacaactatttcaagagggtaattattatttatggccaacgtcaaatgggagctatgtctatgagcgtaatttaaaagacaaaaaagcacttattgctgtttctttgagtcaagaaccgattgagcttgaagtaggaaaagaatttagtaatgaaagattatcagctggtcaatatgatttagtggcaggaaaattaagactagagccatatgccggcgtagtattagaaaattaaaaagattgaggaataaaatatgcaacttgcagctttaaaacacagaactgaaagtgaaaattgttttgttattgatcattcacacgttaaaattagacttcatacggcaaaagatgatgtggaaaaagtaattgttcattacacggataactatctcccaccaaaacaagctaaagaacttgaaatggagaaaataggtagtggtcaagttaatgattactggggagcaaccttaactgctccatatcaccgaattaaatatacttttgaagtgataggcaaagacggaagtcatgtgatcttcggtgatcgtagtattgaaaaatttagcgataaaaagttaagagaagatggaatgtattttaaagttccgtacttccatgatattgatcgcatcaagactccaaaatggcttaaagatattgtttggtatcaaatttttccagagcgttttgctaatggcgataaaagtaatgacccagcaaatgttaaagaatggaatccagaagatcatccaggcagagaagatttttatggtggagacttacagggagttttagatcatctagatgatctacagaaattaggagttacgggattatatttctgcccaatttttaaggcaagttctaatcataaatatgacacaattgattatttacaagtagatccagcttttggagacaaggatttgtttgcaaaagtagttaatgaagcacataagcgtgggatgaaagtgatgcttgatgctgtatttaatcacttaggtgatcaatcaatgcagtggcaagatgtcgttaaaaatggcgaaaaatcacgttttaaagattggttccacattaattcatatcctgttgaaccatatcgggacccaagtaaaggtgaaaataatccaccatatgaaacttttgccttcgaaaaacatatgcctaagttaaatacggctaacccagaagtacaggactttttattagaaattgcgacctactgggtaaaatattttgatattgatgcttggcggctagatgttgcaaatgaagttgaccaccatttctggaagagattccatgatgaattagttaaaataaagcctgatttttatattgctggggaaatatggcattcagctcgtccatggcttcagggggatcaatttacaggtgtaatgaattatccatatactttacaaattgaagaccacttctttaaacataaaatggatgctaaagaccttagtgaacacctaactgatcagttaatgatgtatccagatatggttgaccaggctatgatgaatatgcttgattcccacgatacggctagaattttaactttagcaaaagacaatcaagatttagctttgcaagcagttgcgtatgaatttgttcaacctggagtgccatgtatttactatggaacagagatggggatgagcggtgataatgatccggattgtcgtaaaccaatggattggagtaagataaatggtccggtatggcaaagagttcatgaattagtgaaattcagactagatcatagtgataccttaaataaaggtactgttaagttaacggtaacagaaaaaggacttctaaaagttgaacgaacaggcaaagaaacaataaaggcctactataataccggtaaacataatgtaaaaattgataaaacagcagctcttagtcagaattataaagcgggagtgttagcgccaaatggctttttgattgaggttaaagcttaatatatgaagaataaaaagcagcaataagatgctgctttttttcttataaatttttgataccggtaacattaaaacaaacattgttaagcgctttcaatgattagataatagatttgtaaataaaaagacttcacgaaagtgacggagaatgatgatgaagagaatttttgaggttgatccttggaaagtaacgacacatgaattttctaaggaagataaaaggttacaagaaagtattactgcaattggtaacgattatatgggaatgagaggaaactttgaggagggttactctggcgacacacttcaaggaacatatttagcaggtgtgtggttcccagataagacagttgttggttggtggaaaaatggatacccaaaatactttggtaagacaccaaatgctccaagttttattggaattggaatcaccgtcaatggtgaaaaaattgatttagctaaagtaaagtttagtgattttgaattatctcttgatatgcatcaaggacttctttcaagaagttttatctatgaaggtaaggatgtcaaagttagatttgaatttgaacgttttcttcatatcgtacaaaaagaagcggctttgattaaagtaaaagctacggtacttgagggaaaggctaagattgattttgattctacgttagatggaacagttgttaacgaagatagtaactatgatgaacgcttctggattccacttggtgagaataaggatacaaaaactattcaggtaaaaactaagcctaatccttatgaagtgcctcaattcacagttttacttaaagaatctttgcgccacaatggtgaactaattcaaactgaagtttctactaaagaagccaagttgagcgaaaaattttcagttgaattaagtgaaggacaaagctacgaacttgaaaaagacgttattgttgtaacaagtagagatgttgaagaaaaagatcaagcaagtgttgctgaagatttaatgaataagcttcaatcaaagagctttgaagaaaacttagccgaccatactgctgaatggcaaaaacgttgggacatgagtgatgttgaaatttctggtgatgcagcagcacaacaggggattagatttaatattgctcaattgttcatgacatactacggtgaagatgaacgcttgaacgttggtcctaagggatttactggtgaaaaatacggtggtgctacttattgggatactgaggcttacatcgttccaatgtacttaggaattactaacccaagcgttactaaagcccttcttcaatatcgtcataatcaattgccaggtgcatgtcacaatgctaaggaacaaggccttccaggtgccttgttcccaatggtaactttcaatggtattgaatgtcataacgaatgggaaattacttttgaagaaattcacagaaatgctgatattccacatgcaattgctatgtataccgaatacaccggcgatgatagctatgttaagaatgaaggtatggatgtcttagttggaactgcaagattctgggcagctcgcgttcactggtctaagtggcgtaacaagtatgtaatgcatggtgttaccggaccaaatgaatatgaaaataatgtaaataataactggtttactaatactatggcaagatggcttctgaaatatacactagagcgtttgccgcttgcaactaaggaagcacaagaacgagttcatgttactgaagaagaaaaagaaaagtggcaagacattgttgataagatctatcttccagaagataaagagttagggattttcttacaacaagatgattttcttgataaagagattcgtccagtaagtgaaattgaagatcaacgtcctattaaccagcattggtcttgggataagatcttaagatcaccatttattaagcaagctgatgttttgcaaggtatctatttcttcccagaaaactatacgaaggatcaaaaagaaaagaactttgatttctatgaaccgttaactgttcatgaaagttccctttcaccttcaattcactcagttttagctgctgaattaggaaagaaagataaggcagttgaactgtatgaaagaactgcaagacttgatctagataattacaacaatgatacagttgatggtttacatattacttcgatgagtggatcatggttagcgattgttcagggctttgctgggatgagatacgaccatgaccaattgaaatttaagccatttattccagataactgggaccactatagctttaagattaactaccgtggtcggttaattaaggtttatgttgatcatcaagaaaccaagatctctttacttaaaggtaaagatctagaaatttttgttaatgataagaaggtaacgcttaaagaaggtgaaagtgaatgcttaaaggactaatttttgacttagatggagttttaacaaattcagctgtctatcatttaactgcttggaataatttagctaaggaattagggattaacttaacggatgatcaacttgatagcttaaggggtatttcaagaatggattctttaaatctaattttgaaatatggcgaccaggaagataaatattctgaagcagaaaaagaaaagttcgcagcagaaaagaatactaaatttgttgaacaagttgaaaaaatgacgccagcagatattttgccaggtattccggaactacttagtgatgcaaagaaacaaaacttaaaaatggttattgcttctgcctcaaaaaatgcacctaagattttaacaaagttaggaattatggatgaatttgatggcattgttgatccagcaacacttcatcacggaaaaccagatccagaaatttatgaaaaagctcaagaattagctggtttaaatgcagacgaagtaattagttttgaagatgctcaagcaggtgttcaatcaattaaaagtgctggtcaatttgcagttggaattggggataaagaggtcttgaaagaggctgattatattgttccaactactaaagaattgaaactttcagaaattgaatcagtttttaataaaaaataagagggaagtagggaaagagaatggttgaagtagatttaaaccatatctataaaaagtacgaaggaaatgataaatattcagttaatgactttgatttacatatcaaagataaagaatttatcgtttttgttggaccatctggttgtggtaaatcaactactttgagaatggttgctggtctagaagatatttctaaaggtactttagagattgaccataaggtaatgaatgacgttgcacctaaagatagagatattgccatggttttccaaaactatgctttgtaccctcatatgtcaatttacgacaacatggcttttggattaaagcttcgtcattataagaaagatgaaattgataaacgagttaagcatgcagcagatattttaggtttatcagaatatcttgataaaaagccagctgaattatctggtggtcaaagacagcgtgttgccttaggacgggcaattgtccgagatgctccaattttcttaatggatgaacccttatcaaacttggatgcaaaattacgtgtcacaatgcgtgccgaaattgctaagttgcaccaaaatttgggaactactacgatttatgttactcacgatcaaactgaagccatgactttagcagatcgggtagtagttatgtcagttggtaaagttcaacaaattggcacacctctagaggtttacaatacgccggtaaatatgtttgttgctggttttatcggatctcctcaaatgaacttctttaatgttcactttaaaggaaatcgaattagcgatggaaaaggtctagatatcgaaatccctgaaggtaaagcaaagatgcttaaagaaaagggatatgacgataaagatctagtatttggtatccgtccagaagatattcattcagaggaagcattccttgaaacttggcctaaccaaattgttgaatcaactgttgttgtttcagaattgcttggttcaactattcagctttatcaaaaagtagatggaacagaatttgtagccattgtaaatgcccgtgattaccatactccaggcgataaagtaagaatgggatttgatgttaataaagcccacttctttgataaagatacaacgaatgctattcgttaacttgcaggagaggacgcttctgcaaaatattgattgggtttacaacgagtgtgaaacttggttcacggttgtaataatgtatttagccagtcatggctaggaggaaaaatcatgaagttatggaaaaaattggctttaggtagtgttgtagcaatatctgctatttcattaactgcttgtagtaacaactctaactcaaacgaatcaaagagctcaaataagcaattaactctttgggtagatactgctcgtgttagttggtataagggcgtggtaaaggactttgaaaaagaacatcctaatattaaagttaaggttactcaaaaccctaatggttcagctaatgcaaaaactgatgttgctaaagacccttcaaaagccgcagatgtatttggtgttccaaatgaccaattaggacaaatggcagattcaggttacattaacccattgtcaccaactgatactaaggaaattaagaagaattccgttccagaagcatacaagggtgttgaatggaaaggcaagctttacgcatatccatattctgaacaagctcaaactgtttactatgacaagtctaagctttcaccagaagatgttaaatcttggaagactatgacttctaaaggtgtagttgcaactgacttcactaatgcttatgtaatgtggccagtaatgttctctgcaggtacaaagttatttggtaatagcggagaagatgtaaaaggctccactatggattcacaaaatggtgtaaatgcaatgaagtggtacgctgaacaaaagaacaataaaggcgttatgcaaacttcaaatgcacttaaccaattaaagaagggtaatgcccaagctatcttagatggtccatggaacgcagctaatattaagaagattttaggtaagaacttaggagttgctccatatccaaccattgaagtcggcggtaagactgctcaaatggaagctttcttaggtattgaatgtttcgctgttaactcacatacttctaatgctaagaatgcagcaattttagctaaatacttatctaacaaagaaaaccaattaattgttcacaagaatgctggtgaaattcctgtaaacaaggcagctcaaaatactgcagaggttaagaacgatccagttgctaaagctgtaattcaaatggctcaaccaggctactcagttcttcaacctaaattgccacaaatgtcaatcttctggaacgactcagctccattaattagcggtgcttacgacggcaagattaagccatctcaatacaagagtaagcttgctaaattacaaaagaagatttctaaagaagaataatcttaaaaaaacacataagcaaaggtttgattaattatgtttaagaaaaaacatgctacgcctgcagttaccttaaaggaaacatggaaagatggagatgcagtaactaaattatcattcttcatcatgggcttaaatgctattaaacatcggcaatgggtaaaaggattttcacttttatttgctgaaattgtatttttagtttggttctttttaagtggaattcattcaattgctggattaaggaacttaggtgcaataaagagtaaacgcgttgtatttgataaagcacagggagtatatgttactcaacaaccagataattctgttttaattcttttatttggtattctggctttattcattgttgctggttttatatatctatatatcattaatttgaaatctaataagcatactttcttattagaaaagagacatgaacatattccaactaaccgtgaagaaattgcatctttgtttgatcaaagattgcatgcaactttgatgacaattccaattgttttaatcattttatttacagttttgccaacagtattcatgatttcaatggcatttactaactatgatcgtcaacactcagttggattttcctggactggttttcaagcatttggaaacgtgttaagtggtgatttagcaggtaccttcttcccagttttaggttggaccttaatttgggctgttgctgctacagctactactttcttctttggtgtcttattagctcttttgattgaatcaaagggaattaagcataagaatctatggagaacaattttcgtaattgtttatgctgtaccacaatttgtttctttattaatgatggcgcaattccttgactatcaaggaccattaaacaccttacttatgaattggggatggattagccacccaattcacttcattgataaccaggctagtcctcttgttgctcgaattacagttattgtggttaatatgtggattggtatcccagtttcaatgttaacttcaacagccattattcaaaacttaccacaagatcaaattgaagctgctcgtattgacggggcaagtccagtacaaattttcaaccacattacattccctcaaattttattcgtaatgtctccagctttgattcaacaatttattggtaacatcaacaacttcaatgttatctacttgttgactggtggtgcaccaatgaacaataactacaatggtgctggttcaacagacttgcttgtaacttggctatataacttgacatttggtcaagaacaacgctataacgcatcagctgttttgggtatcttgatctttatcattagtgctacattctcactaattgcatatcgtcatactaacgcatacaaggagggctaaaaatgaagtcttatcgtaaccaaagaagaattgctttaatttttagatatgttctattagccatcctgggtgttttatggatattcccaattatttggatcattttagcaagtttttcatacaataatacaggatttgtatctacaatttggccagaaaaatttacttggcaaaattatgtcggtattcttactagttcacaatatccatttataaactgggtattaaataccttatttgttgctgttatttcagcaactctatcaactttcgtaactattggagttgcttacgtattatcaagattacgcttccgcttccgtaagccatttttacaaattgctttggtattagggatgttcccaggtttcatgtcaatgattgccttgtactacattttaaaggcattaaacatgttaaaccttggtggattgatcttagtttatgttggtggtgctggccttggcttctacattgctaaaggtttctttgatactatgccacgagcaattgatgaagctgctgaaattgacggcgctacgaaatggcaagtattcattcatattggattaccactttcaaagccaatgattgtttatactgcgcttacttcattcatggcaccatgggtagacttcattttctcaggtatcatcctctctacctcaggaaatccgaagacctacactgttgcctatggactatacaacatggttcactcggcaaagggtacgatggctcaattctttactcagttcattgccggatgtgtaatcattgcgatcccaattacaattttgttcattgtaatgcaaaaattctatgttaatggaatcacagcaggtgctgataaaggttaatcaaattaaagtttatgtgaaaaaagtgtcctgtcttaacagggcacttttttatttgtttgaaggagaaaaaatatgacaccttggtggaaaaaagctgttgtttatcaagtttatcctaagtcatttcaagatagtaatggtgatggaattggagatatccccggaatcatttcacggctggggtatctagaaaaactgggaattgatgctatttggctgtcgcctgtttacttatcccctggtgtagataatggctatgatatctctgattatcaaaaaatagacccacaatacggaacaatggctgacatggataatctgattagagaagctaaaaaacatcatatacgcattattatggaccttgtcgttaaccatacatctgaccagcatccttggttcattgaagcaagaaaaagtaaggagaatccatacagagatttctatatttggcatgatccggtagagggccatgaacctaatgagttgaaatctgctttttctggttcagcttggaagtttgatgaaaaaactggtcaatattacttacacttcttcgccgatcaacaaccagatcttaattggaagaacccaaaattaagaaataaaatctatgaaatgatgaattattggatcgataagggaattggcggctttaggatggatgtgattgaacttattggaaaagatcccgataaaaagattcgcgagaatggtccaatgcttcatccatatttaaaagagatgaatgagaatacttttgccggtaaagaattaatgacggtgggtgaaacatggaactctactccaaagattgctgcagaatattcagatccagctcgtcatgaattatcgatggtatttcaatttgaaaatcaaggcttagatcagcaagaaggaaaagaaaaatgggatttacgtccgcttgatttaggcgaattgaaaaaagttctagttaaatggcagacagaaattgattttaatcatgcatggaatagtcttttttgtgaaaatcatgatattccgcgagttatttcacgatggggaaatgacaaagaatatcgagttcaaagcgcaaaaatgtttgcgattgtactgcatttaatgcacggaacaccttatatctataatggtgaagaaattgggatgacgaattgtcctgttaagtcaattgatgaagtagaggacattgaaagtatcaatatgtaccgcgaaagaattgataagggctacagtaaggatgaactaattaaagcaattaatactaaaggtcgagataatgcacgccgtccaatgcagtggtcaaatggagaaaatgctgactttactacaggaacaccgtggctaaaattaaacccaaactacaagaccattaacgttaaagaagccttagaagatccaaattctattttttatacctatcaaaaattaattaaacttcgccatgaaaattctgttgtggtggatggagattttgaacttgttgaaaatactagtgataatattttggccttttggcgaaaactagaagatgaaaactggctagtagtcgctaacttgtctggtgaggaccaaaatctaaatttagatattccctttaaagaagttttgattagtaactatgaaaaacgagacagtttaaaagatatggttttaaaaccttatgaagcttttgcagttaaggcatagtaaaagacgcattgaattttatcaatgcgtctttaatttatttctttttatttggacgtcgtaagtagcgtaaagtattatttcgaatatatttttgaaattcttgataaattggatcaaaaatttgaggttcatcagtttctttaaccattacttttggaaagaagaaacgctcatctccttggagagttccatttaaggatttaacgagtgggctcaattcagacagttcgactaagctaccatcagcttgcatgatttcaattggactgtgagcattttttccagttggcttatatgcgtcatatggctcatcaaaagctgaattagtagcagtatagtagttaggatcaaacccagcttgtttaatgagattctttagttttggcagtaaactcttagtatcttcattaattttgacactttcaaggggatgacggtataagtaacgatttgaaagatcagataaaatttgatcccctgagttggtccagagtaagaaattagtttccattacgccatcatctaacttaaggtaatcttcaagagtccattttccgtttaaaaatgcttctagttgaggagtaacttgaagtttgccttcttcatagatgatttgagctctttcaagtaagtgatgtaagataacttccattgaacgattgacacggtgaaagtaaacttgttgatacatttggtaacggctaataatgtaatcttcgactgagtgaattcctttatctgtaaagcagatgccatcacgatatggacggattacttctaaaattctagttaaatcaaagcttccgtaagtaacaccagtgaaataagcgtcgcgtaataaataatccattctatctgcgtccgcttgacttgaaattagtttgactacctgaggattagggtaggttttagcaataacactagccactaattctggaaaattaggacttacttttcttaaagcttgattaacttcagtatttttatcggtaataatctgttggcccattttttcatgattagtaccaaataggtgctcaaaagtatgagaataagggccatgaccgatatcatgaagtaaagctgcacattctgctaagagtctttcatctggattccataatccatcgcctggctctttacttacatacttttcttcaaaaatatcacaaattcttctggtcaattcataaacacctaggttatgttcaaaacgagtatgagttgctccttgaaaaacgtaagatgccggtcctaattgcttaattcggcgtaaacgttggaattcttttgaattaatgatatctaaaataacttgatctttaacatgaatataattgtgaactggatctcttaatactttttcatgatccagctttttactttgaaatttttccatttttcttatactattttctcggataataaaataaatttgctaacgtataatcaatttgattataacaataatgctactttaaggctatcttggcgtgaatgaaggtgaaaatatgaccaaggaagttgaaattaaaattactagtaaaattcatcaggaagatgaatcagccgtttttgaaagagatggcttaggatcaattgaaaaagttggcgaagattggcgcataaaatatagcgaaaaaaataaagagggcgatgttgaagtaaaattattaattaagccaaatgaacttgtaatgcaacgaggagacgctaaaggtgatcatacgctaatgaaatttgagccaggagaaaaaagaaaatgcaaggttgtagcttctggtaagcaaatgaatttagagtctttgactaataaattgaatttttctgaaatttctccaggaaagatgcaactaaaagttgaatatgatctcttttctggtctatacttagtaggtaactatgcaataaagattgatataatagaatagatctttagcaaatttagataaattgattacgtgaaaggacgtgccactgtggggttagatgattttcaaggccaaaataaagacgaattgtcaatgatcgaagttgctcgtgcaattttacaagatagcggcaagcgaatggcctttgctgatatcgttaacgccgtccagaactttctgggtaagagtgacgaagaaattcgtgagcgtttgccacaattttacactgatatgaacactgatggtgaattcatttcaatgggtcataatgtttgggcattgcgttcttggttcccatatgaatctgttgatgaagaagtaaaccatccagaagatgaagaagatgtaccacgtaagaaacaccacaagaaagttaatgctttcattggtgattctgacgatgatgatattatcgactacgattcagatgatccagaagatgaagatttggatgttgacgaagaagatactaatgaagacgactactcagatgatgatcttgatgatgccgatgacaatgaattagatgatggtattgaaggccaattatctgaacttcatcaagatgatcttgatgacgatgatgagtaaagtacttgacggaaagtaattttccctttagtattttgtatgggcactctatgtgcaattaagctcccatgtatttgggagctttttttgattttaacagagaataaaagaaaagagaggaagcacggcatgacaaagtatatttttgtgactggtggagttgtttcatcactaggtaaggggatttcagcttcaagtttaggacgtttacttaaaaatcgtggcttaaaagttaccatgcaaaagtttgatccttacattaatatcgatccaggtacaatgaatccatatcaacatggggaagtttatgttaccgatgatggtacagaagctgaccttgacttgggtcactatgaaagaattgttgatgttagaacaagtaaatattctaatgttactactggtaaaatttatcaagaagtgcttgataaagaacgtcgcggtgactatcatggtgcaactgtgcaagtaattccacatattacggacatgattaagaaaaaaatcatgcgtgctgccttaacaactgattcagatgtcattatttctgaaattggtggtaccgtaggtgatatcgagtctactccatttatggaagcaattcgccaaatgcgtcgtgaagttggtgaagaaaatgtaatgtacattcactgtaccctagtaccttatcttcatgctgctcacgaaatgaaaactaagccaacgcaacattcagttgctgaacttagaagtattggtattcaaccaaatatgcttgttttaagagctgagaaaccaattgctcaagagttaaaaaataagatttctacctttactgatgttccagtagaccgcattattgaatctattgatgctccttcactttttgatttaccacttgcttttcaagctcaaggtatggatcaaaaggtttgcgactttttacacttggagagtccaaagccagaagcagatatggaagcttggaagaaattagatgaacgtgcaaagaacttaaagaacgaaactactattaccttagtaggtaagtatgtagaacttgaagatgcatatatttctgttactgatgcattgcaacacgctggctacttatatgacactaaaattaaggtaaataaggttcaagcagaagacattactgaagacaatattgcagaaattatgaaggattcagatggattaattgtacctggtggttttggtacacgtggtcttgaaggtatgattacttcaattaaatatgcccgtgaacacgatatcccatttttaggaatctgcttaggtatgcaaatggcaagcgttgaatttgccagaaatgtacttggcttaaaagatgctaatagtgcagaagctaatccagacactaagaataatattattgatattatggctgacaagcgtgatgaagagaatattggtggtacgcttcgtttaggtctatacccagcaactttaaagaagggtactaagacacgtgaagcatatgatgaccaagatgtaattcaagaaagacaccgtcaccgttatgaattcaataatgaatatcgtgaagcatttgaaaaggcaggcatggtcttctctggtgtttccccagataatcatttagtagaaattattgaaattccaaataaaaaattctttatcgcagctcaatatcatccagaatttttaagtcgtccacaaagaccagaaggattgtttaaagcatttattggtgcagcaagtggtcttccagcacaacattttaactagactttaaaaattaaatttcggtaacaagagagccataatcctcggcttctcttgttttttttgcgtttttcatttaatatattttgtgatacatttgggtattacaaatagagaaaaggattgtttccccaatgaaacagatgattattcatggtggaaagcccctgaagggcgacgtatggatcggcggtgctaagaattccactgtagcattgattccagcgtcaatactttcgcggactcctgttaccctagaaggggttccgcgaattgctgatgtagataatttgatggatctacttagtgaaatggatgtaaagtgtgattttcatgaaactactttacgaataaatccggataacattaagcgtagtccccttccagcaggaaagattaagagcttgagagcttcttactactttatgggtgcattattaggtcgctttggtaaagctgtggtgggctttccaggcggagatgatattggccctcgtcctattgatcagcatattaaaggctttgaagcattaggtgcaactgttgagaataaaaacgatcaaattatcattacagctcctaaaactgggcttcgtggtgcaaaaattcatttaaagatgccttctgtaggcgcaacgatgaatataattatggctagtgtaatggcaaagggccaaactattattgaaaatgctgctaaggaaccggaaattattgatttagctacatttttgaataatatgggcgccgttattcgtggtgcaggtactgaagtgattcgaattgaaggagtagaggaattaaaagcacaaactcctcatactattattcctgatcgaattgaggctggaacatatgtagctctagctgcttgcatcggaaatggtattagaattcataatattatcgaagaacacctagattcttacttggctaaagtagaagaaatgggtgtagtaattgatgctgatgaagattcactttatgtttatccagcaggtgacttgaaaatgattcaagttagaactgatgtatatcctggatttgcgactgatttacagcagccaattactccacttcttctaacagctaagagcggtgaaggcgtagtaattgatcaaatatatcctaagcgtgttggtcatattcctgaacttcagaagatgggtgcaaatattcaggtagaagataatattatcttagttcatccaactcatcatttgcatggagcacatgttagtgctggtgaaattagagcaggcgcttgtttgatgcttgctggcttaatggcagatggtgaaactatcatttcaaatgcaggaaacattttgcgtggctatgatagaattgaacaaaagttgcgtcaactaggtgcagaggtatctgtgattgatgtttaattaaaatagaacattaaaaaagggcttggaatctccaagtccttttttattggttttaagaattttattggttttaagaaaatatttttatttagctttgtacttcaattttttctggggcagcaggaatatgttgctcttctaagccagattttcctttaaatagtaaattgagaatcgtagcacttaagcttgctacaacaataccatttccaaggaataattgaatagtttctggtaaagcttggaaaacttgtggataaacagtaacacctaatccgagaccaattgaaatagctacgattaggatattacgagtatcctcaaagtctactctcttcagcattctcattccctggacggcaatcattgtaaacatcacaagcatagcgccgcctaagacagagtcagggatgatagttactagagcaccaaatttagggagtagtcccattaacattaaaaatcctgatgcccagtaaattggtctttttgtagtaatacctgataattcaagtaaacctacattttgtgaaaaagtagtgtaggggaatgtattaaagattccaccaaggatctgtgcgagcccttcagcacgatagccttttttgaggtcatcgctagtgatgtctttgtggagtaaatcgccaatagcaaagaatactccggtagattctaccattgaaacgagagcaatgataatcattgttaaactggatgaccactcaaactgtggcattccaaagtaaaaaggttgaggtaagtggaaccaagaagcttgagcaactggagtaagtgaaaccatacccagagtactggcaattaaggttcctgcaattaatcccactaaaacagcgatggatttgataaatcctttgccccaaacttgaagggcaagaataattgctacagttataaagccagttaaaagatttttaggatcaccgaagtttttagctgtagaattgcccccaccaagattttgaatagaaaccggaattaaggaaagtccaattactgtaattaagcttcccgttacaactggtggaaagagctttttgattttagaaaaatagcctgctactaaaaatacgaaaacacccgctacgatgattgcaccatacatagtaccgatggtgaattttttcccaatcatttgaagaggagctacagcttgaatagcacaccctaaaacaacaggtaagccaattccaaaataacgattacgtagaagctggagagcagttgctaaaccacacatgaagatatcgattgaaactagataagtcatttgagtggagttgaattttaaggcagttccaattaaaagaggaacggcaattgctcccgaatacattgcgagtaggtgttgcaagcctagtaaagcagcttttttgtggttaacttgtgtgtgcttcatttattcttctcctacaaaatgcacttgattgttttcaaaatcagaaattctagctaaggcttcaagactgtagccgtgatctttaacccattcgctgccaccttggaattctttagctacaactacaccaacaccagctacagttgcatttgcttgatctgcaatattaagcatccctttaacagcttctccatgggctaagaagtcatcaataattaataagtgatcgtcactactcaagaatttcttttcaacacaaattttattattaacttttttagtgtaagaaaatacgtctgcccaataaacagcatcattaagagttgaaggttttttctttctcgcaaaaaccattggcactcctaattgatatgcagccataataccaggagcaattcctgaagcttcacaagtaagaactttagtaattttttcgttttcgaataaacgcttaaattccttaccgacttccatcataagttgcggatctacttgatgatttagaaaagagttaatttttaaaacattgccatctaatacttctccatctttacgaatccgttcctcaagtaatttcaattttatcctcctgcaaaaaaagacttcttctacccgtaaattagggtaaaagaagtcctttgtagtgctacttatgacatcgattacctatagtccagaattaattggttccgggtagaaactgtcgaccttattacgacgatatatagatatttgatatctagagtgtagcagaatcattttccgaacacaaggcctcttttttgatgtattattctgaaattgattttttcttttttaaagaaaggattgcctcaagaattccatatgtaattccagcaagtggccaaataatccagctttggctccaattcttgctaatgaaactataagcaagatagataaaagaaatagtcatccaataaatagtggcatatttttcaattatttttttgctggcctttttctcagcagtatagtcttctatttgtaaaataatattaaaactatcacgaacaatattggttttgactaagaaaaagacaccaattcctacaagaaaaatcgtagcagttgaaagaccagtcattaggtcatcaattcggctatttgaaagagaaccaataaataaagagccagtcataagtggaatagcagataaaatacaaaaagtaatgccaataatctttagaactaggtgctgattttcatattctttacttaacttaagaacttgctcttttgtttcttcagaaagattacattcttcatactcaaaattttcgtgaacttttagccagtgatttcctgcaataaagagagccacagcggctgcaactagaagtattagaacaattacgccaattcctgttacaaaattaatcgatgaagctaagatatctaatcttgttaagctgattaagattaataaagtaattggtgagaaaatacatagcatgacgccaatagcaatcaacgtagaactgcgcttcctagcagataagaaatcgtgaaccgaagattgagataagcattttgtttgagacataggtatcacctcttttgtatataaaaattgaatagtatagatttacttcaattttatataacaaattattaaagcgctattttgatgcttgtgaagttaaaaaataaattaatgattgaccaattgaatttttcttagtaaagtttctagtaaatagggataaattattttttagaaggagaaaattgtggctaagactaatctaaatgattttgacaagattattgtgcttgattttggtagtcaatataaccaattgattactcgtcgaattcgtgactttggtatctattcagaacttttaccacatgacttaagtattgaaaagatcaaagaaatggcccctaagggaattatcttttccggtggtccaaacagtgtttacgataagggtgctttaaaagttgatcctgaaattttcaagcttggtattccaattttggggatttgttatgggatgcaactcatgagttacgatttaggcggtaaggttgaaaaggctgataattccgaatatggtcgtgctgatattgaggtaattgatcctaatgcagttttatttgagggcttgccaagagaacaatacgtttggatgagtcatggtgacttagtaactaaggctccagaaggctttactataactgctaagagtaagaattgtccaatttctgcaattgctaacgacgagaagaagttctatggaattcaattccatgccgaagttcgtaattccgaatatggtttagatattttgaagaactttgcatttaaggtttgtggtgccaaagctaactggaccatggatgactttatcgagatgcaagttgatgaaattcgtaaaaaagttggcgataagaaggttatcttaggcctttctggtggggtcgattctagtgttactgcaactcttcttcacaaggcaattggcgatcagttaactgcgatttttgttgatcacgggatgcttcgtaaagatgaaggcgatcaagtaatgcaagctttgaataaggatcttggggttaatattattcgcgtgaatgcccaagagcgtttcttgaataagctcaagggagtaactgatcctgaacaaaaacgtaagatcatcggtaaagaattcattgaagtcttcaacgaagaagctaaaaagttaaaggatgttgacttcttagcccaaggtactttatatactgatgttattgagtccggaactaatactgctcaaactattaagtcacaccacaatgttggtggccttcctgaggacatgcactttgaattaattgaaccacttcgtaaacttttcaaggatgaagttcgtgaacttggtgaaaagctcggtattcctcatgatttggtatggcgtcaaccattcccaggtccaggtcttggtattcgtgttattggtgaagttactgaagacaagcttaagattgtgcgtgaatcagatgcgattttacgtgaagaaatcaagaatgctggtcttcaagaagatatttggcaatacttcacggttcttccaggtattcgctcagttggggttatgggagatgggcgtacttacgactacactatcggtattcgtgccgtaacttcaattgatggtatgactgctgattttgcccaaattccatgggatgttttgagcaagatttctactagaattgtagatgaatgtgaccacattaaccgcgtagtttacgatattaccagtaagccaccttccactattgaatgggaataagctgacaatgttagttgataaggaaatcctgatttgacagcatttaacgaaggcaaaacttagacaaaataataaaaaatggtttggttgtctgccaaaagtctgccaaattatataggctcttagtataaactaagggtcttttttgatgtagagacaaagcaagtttataactgaattgtaaatataagttaacgttttaagagctgtataattattaatttgtaatttaaatataatatggtatcatatagatgaatgtctatgtattaaggagatataaatggattaccaagaattagcaaacttattaaaagtcgttgcagaacctaaccgacttaagatcttaaacttactttcatgcggagagatgtgtgcttgtgatattcttgatcatttcaattttacacagcctactctttcacatcatatgaaagtattggaagataagggattgatcttagtgcagaagaggggtaaatggcactattattcattaaacccagaaaaatcaacagtaattattaatggattaactgaagtactatcaaattctgagaattgtatttgtaaggatgcttaaaaagtttgttaatccttttattttgaataatacatagatgattatctatatatagagggagttttttattattatgaatacgtcaaaaggcttatctttcatggatcgctatatgactttatgggtatttctagctatggctttaggaattgtgattagttttgtctttccatcattccctaagttaattaacagttggtcagtgggtactacttcaatacctattgcgattggtttgatcttaatgctgtatccacctttgacaaaggttaattacgataaaatgggggatgtttttagagataagaaagagcttgttttttctttgattcaaaactggattgttggtccacttttgatgttcgctttagccgttattttccttcatgattatcctgactacatggttggtttaattatgattggattggcaagatgtattgccatggtaattgtgtggaatgaattggcacaggggaataatgattatgcagccggtttggtcgcagtaaattctattttccaaattgtcttttattccgtttacgcatatgtttttattagtgtattgcctaaattcttcggcattcaaactcatgcacttaacgttacgatgggcgaaattgctaaaaccgtctttatttacttgggtattccgtttattttaggaatcggttcacgctatttgattattaaatccaagggcaaagattggtttgaagctaagtatgttcctaaaattagcagaataaccacctgggctttgctttttactatcgtactaatgttttcggttaagggcgttaaagttgttcaattgccgcttgatgcagttagggtagctgttcctttattactatacttcgtattaatgttcctaattactttttggattgcgaaaaagacacgcacaagctattcaatctccgtaacacaagcctttactgcttcaagcaataactttgaacttgcagtggctgtagccgttggtatttttggcttaaactcaagtgaagcatttgcggccgtaatcggtcccatggtagaagtaccggttatgatcctattggtagatgtggcactttggataaagaggagatactacaagtaatgaagaaaatatattttttatgtactggtaattcctgtcgtagtcagatggcagagggctatggcaagatcctgttaaaggataaatatgaagtgaaaagtgcaggtattgaaaaacatgggttaaatccatatgcggttaaggctatggcagaagatggcgttgatattagtcagcaaaaatctaagttaattgatccagattatttgaattcagctgatcttgtggttaccttgtgtggggatgcaagagatcgttgtccagccttgtcgcctcaaacgaaaaatcttcattggcctttgattgatccgacgcaagcacaaggaacacctgaacagaaaatggtaatatttcgtcaagttcgtgatgaaatcaaaaagcgtgtagccgatttgaaatgaaaaatattaagaaattttaaagaagaaattttgaaattgatagcaaacttaagaaatggtataaattaactataagtatttaaaggttttattttatttttaaaggtatatttttttattactcatggtgatgtaagtactattacattgcgccaacatggtgtgtatagtgtcattatgagagatgttggataagtcgtagaacaatgttaccgttgctacaggtctatgactgattttttatagaaaatgtagcgataccaccgtgggcgccacgctagcggatactggtagtagcgtggtttagttatttttaagttttaaaggaatttttaactttttaacttctccagcactagcggtctgcccatttgatggaaaactgaatagataatgacgagaagcatgtgtttacaaacacgtgcttcttttagttatcgcggattatcaaggtgttagagaaggctttaacattggtaatccgctttttttgtcgtcaattttagttaaagggatgccatatcccgctgtctcaatttaggaggttataaattggctcaaactaataacaatcaatcagttgaaactattaaggaatcaacttttgcagcttcagtgttgcccaaggctacaccaattgcaaatgtacttcaaaagccattgaagttagctacgggtagtatctttaaggtgctttctggtacaaatgaagatgttaaggatagtaacggtgataacactgtacgtgcatgttatcgagttcagtcattacgcaccgtattttgatttagcaaaagagagctctagttggatgcgcatagaaggtgaatttaggcataaagcggcacatgcaattctctcagatttaaaagataaagatgaagaagaattaggtcaaaaactaatcggttacgtggttaatcaatggctgttaacagacaaaagcaaaaacttaatcccattatggcaaaagttaactgacttggctaatggttcaggtgctattcctccgcttgctccaatgttaacagatcgactagttcaagagattaagtggtttttgaccggtggagcagcaggtgtattttatcgtgtttttcagttatttggtgaggttggtaaaggtgattttctcctgcttatgttcgactacgttgaaaagccgaatgaaaaagagcattttaccattccgggtaatatgagtaaggatttggagctgattcaaaaacagcatcctaatatagaaacgattaattactatcttaaacgtgctgtcaaggagattgaggaagaaaaaaagactagtcaaaccgaccaaagtaaagactagcctatataaagcgaacaaaccaatgcgacggctgttcgcttttcattatcttccattttgaagtttttgaaaaggaaaagactattatgaaagaattagtagattttacagacttagtaaatatgggatataagcctagtcaggctagaaccattattagaatcgcaaaaaataatatggtaaaagctggttatggcttgtacaataataagcgtctgggtatagtcccagttaaggctgttgaacaaattacaggattatcccttcacaaaagaaaggatgatcggtaaatgccggttagtaaaactaaatatgctgacgtttacaaagatgataaaggacacttcttttatcaaatctttctaggcagggatgccaaaggaaagaagcatttcaaaaagggtagaaaagatgaactgaagcactattttactagtgctagggcagcacatattgaagcacaaagggttaagcaaatttacttaaacgtcaatttaggtgatataacttacgcgagcttcataaaagaaaagttcttaccaaagtacaaagctgacgttgaaggcagtacttacgaaacacattcaaaaatgtttttgcatgccgtggactttttgggtaatgtaacccttaaaaaacttacagtagaagaatgtgagaggtataggacttagctgttaacagaagctaagtactctcaaagttatgctagtgtagtgtatacggcctttaggcaaagcctggattacgcagtagaaattaatttaattcctgcaaatccttctctgaagacgaaatctgtgcctaaaggcaacgctacggctaagtattggacgaaggaagaatttgaaaaagttctttcgtctgtatctgtttctagtttttatgagcgtttaatttatgtaacgttcttgttcttttataggatgggatgcagagtctctgaagcaggtgcattaagatggtctgacgttgatttaaacaatggtaaggtaagatttattaataacctccactataagaataagatggaatatgagctagtgctatatttgaaaaatgattcaagtcggagaactttaactcttgatgatgaacttgttagagttttagaagattggaaaaaagaacagcttaagtatagtgttcatgattttgtcttgtcctatgacaattgtccattgaataaatcaaccttaagcaaatggcttaaacgctattccaaaattgctggtgttcctagagttgacggtagaggattgaggcattctaatgcttcttatcttattgctgaactaggtgcggatgttttaacggttagtcaccgtttagggcataaaacacctatgacgacactgaaatactatgcgcatatgtttagtaacaatgacattgagttagcctctaagatggaaggaagcatggatatttctcctgcagaaaaatcaaaagttacatttaatggtaaccaacatttagatggaaacaaaatagacggtctgccaaatgtctgccagaagaagaaaaaggctagttaattagttgatataaaaggaacgtcgtttattctaagggaataagagactcatctctgaaaaaagaatataaatgaaaaaagcctattaaatcttggtattgatgaaccatgatttaataggctttttatagtatttaattaaactcaagcttatttgcttcatcgatcttagttaggaaagatgaaacatcagtaataatgtcattggtgtatgaaacattaatcagattaacccaattttttcgaagaaaatagtcgtcaatgtcgtatctaactttagttaagtatttataactaataaatagtaattcagaaaaaatcaaattacgtttttgaggctgcataacgaaatccagtaatagatcttttccagcacccttaataaagtgaaaaaattcgcaattgatatgtctaatcggatgaaaaggatataaaatttgagaatttaatacttgtttttcaaattgtctaagtaatttttgatcttttttactaatttgataatcattgttgtttaaattaatcatcgtatatcaattcctgttctaactgttacctaaagtatataaagtgaaaaaagtaaaaacaatgaatgttaactaagttgaaaaagaaaaactttttatatcgaaagtaaaaaattattttacttttgatataatatttttaataattaagtaaaagaaagttacagactataaatatttacggaagagaagtgaggaacaagtttgagtgatattagggtacagaatacaaaaaataatttgattgctgctcttttgagctgcttagaagatgagagtttccataagctaaaagtaaaagatattattgataaggctggcgtaagtactagaacgttttatcaatattattcagatgtcaatgatttactaagagatacagaagatagctttattacagagtatctaaaaaatgttgaaaaagatcgtgattcattaggagatcttgatttagatacaccttttgaagatcagttagaaaatattttaaatgcaacaaaaaataccattgagttttgttatgcacataaaaaagaaatacaagtcttgttatcggataatggagatacgcgtttttataatatgattttccagactggttgtgaggaaattatgaagcgtatgagccagatgaaaaatatcgataagttaaagatgaatgaaaaagaacagatgagaatgatgattagtgtacaggtatttgtacatagtatcattggcatggtaagagttttgcttgaatacagcgataggttagctccatatgacgttcgtcaaagtatacttacatttttacgtgagtcaccggtagcttccatgaatataaataaaaaatagagacaacaaaataatttatagtatattaggctgaactccacgataactggctaaagtattgaattaagtggttttgttggcaattgagaaataattgtacttaaatatgaagtagcataagaagaatagtaattaaaaacgaagttttagggatacgtcaatgaaaatagaaattccaactatgaatggatttattccagattgctacagtaaatttgctaatgaagatcaaaaaattgaagggaagcctagtagatctttcccaatttttattactgatgcacctgataaggcaaaaactttagctatatattttagagattttgattcagttccagtctgtggatttacatggattcactggttagctgccaatcttccggttcgagatgttccagctaatattagtcattctaagaatagcagccttgattttgttcaaggaaataatagtaatattagcaagtttttaggtgaaaattctggcccagttgaaggctatacaggtccgatgcctcctgataagacgcactattacaccttaaccgtatatgcattagacacaaaacttgatctaaaagatggctattggttaaacgactttttgcgtaaaatggaaagtcatataattgatagtgcgactatttcagttccaagtagagcaaaataaaagtcgaagttactaataaatatgctataatttaagtaaagaaaaaggagatccgaggatctcccagacagcccgctttaagagcggtgacaaaattatagttttggcaaacgcctactcaataactcggtcaaaagttatatattgagcggcgttttttattttttgttgtggttgtcgatatatgttagcaatgctaacacaaaagtaccaaacaacagcattaacgagatgacctcgtatacgctcatctggctgaaccctttccaattgatgtcggtccataggcctcacctccgggaggaaaaacagcccccgctcataaaactttctgcggatataattataacgaaaatttatttgcaacagaatatagattagttaaaaagctcgcgattaatttcgcgggcttttactattaaacttattctgctttttccttaataaaaaaatatgtaaatagacaatagattataattcctaaataaaaaacatttgtagaactaaaagcaggttcaataaatctactaacaatgtagtctatacctaaaatacaaaaaatatagatccagctcccgtaaacaaataacttgtgtaagttagatggtagatgctttctgtatttaactaaaagagaaagataacgaagttgcactatataagatataaagaaatatgcggctccactgaaaattgaaaaagttattccccaggcaataagagagactgtgccgttagagttgctgagtccactaattactgggccaataatacctaagactgctaggatacaggataaaactaaatatttatcattagtatgatgaaaggattggataacagaccttaatttctttttctcttccataatgtcaaagttttgtttatttagatgcttaaattcacgcataataagaaaactataaattagaagaccaaacgaaattgcaagaactacaatggttgcagcaaatccaataagtgaaatgattaattgcattttatcactgacacctattaggaatcctgaaatagcactgcaaaaactaatacatgctggactgaaaatagcgagagcgattgatagagcgcgtaattttgaacttttcttagcagtagagagatacttttgaaccaatttatcaggtaaaataggtgatttatcttctgcgggaatatctgctgttttaatttcaaaagatggagcaccactttttagtaaataatctgtggtgacgccaaataattctgataagctaacgattttttcaatatctggaattgattgatcactttcccattttgaaacggcttggcgactaacattcattttttcagctaagccttcttgagaaagattattcttttttcgtaattccgtgattttttgacctaatctcatatggattgtcctttcattgttgattgattttaatttattaaaaatcatggttgcagacaaccactttttgattgcattgtgggcaactaatggttgcgagaggaaaaattatagtgattaatcttagttaagtaagctattctctgcttttgtgtagaatttgtgacaccgccaaaatgaatccaatgtcgatgttgcattcctaattgctttagagttttgttaacaaaaattcgtttaataccatttcccaaaaagagtttgacataaaaagttggtgaagttgaagtggtgaggacataggtatgtttaatgttggttaattcgccatgaataccagttttgcttacagtatgggataatccttttccttctttcataactttgtcaataaagcctttaagcattgccgggatactattccaccaaagtggagtaataaaaattattgcggaagcttctcttaagtaatttaagtattttgttactagaggatcatgagttttaccagtatgaaataaacgtaattcttctttgtcataaataggattaaattgttcttgatacaagtcaattactttaaagcttttatgcttatgtgctaaatttgattttactgattctaaaattgcatggttaaaacttttttcataaggatgacaatagatgattaagaaatccattttaatcttttcctttcaaaagttgatttaaagtgtattccactaattgtgcgtcatagcgagtaattttatttttaattagtaatgcatatccttgaataaaggaccagatttgaataaataaatcttgatcagaaagagtagttgatgaattaagattagtaattaagttttttactttgttcaaaaagggatattgattagcatttgaatataaatctagtgctgataattggtagaataagaagtccatttggttgggatgcatagttatagactgacaaatatatttagcgataatgagtaactgttgtttagatgaataatcttcatttaatgggatctgctcaataaatcgtttagataattggattactactttttgaaatagttcatttttatctttgaaatgtctataaaaagcccctgttgtaagtcccagttcctttgtaagtttgcgtaaacttaagttttgatacccattagtgtcgattagatgaacggtttgatttataattttttcttcggttgtcatttttatcttctttcttgataacggtgttatctttttgggtctatgataacactgttattatgacaataaaagataaataatttgttataatacacgctaaggaaagtaaaaacacaattcggttggtagtccgaatgtatgatttattcatatcagtaaccttccctcctaggatgtccctctttcctcttatttttaggagggtacatagtgattaaaggtgtattaactattatttttgatgaaccattctacaaagcaatttttgagcaatttgatggtactgaatataaagtagctcaagttaatatgggaacatcattgccaacgatgccaaaaataattaacttggtgaatgagcattattctgacttacgatttagcaaatcaactcgagatcaggaagtaatgcatcatattaacccgaaaagagctcaaagattagcgcataaagaagttcgaaaacgtggaattggtactaaagctcaacaagctttaaaaaagcaatttgagaaatcgaaaataactagaaaaaagatgaataaagatagaaagcgtgaaatgcaaaaagagcgttttttacaaaaacaaattaaacgtcgaaaaaaacatcgaggtcattaataaacaaaagctcgcaattaatttgcgggcttttgttgataaatatgctataatttagataaagaaaaaaggagatccgaagatctcccagacagcccgctttaagagcggtggctaaagttataaagttgacatgcgcctactcaataaacctgccaaagttatgaattgagcggcgtttttgtttattttttgttgtgatgatcgatatatgttagcaaagctaacataaaagtaccaaacaacagcattaacgagatggcctcgtatacgctcatctggctgaaccctttctgcttgatgttggtccataggcctcacctccaggaggtaaaacagccaccgctcataaaactttctgcggatataattatagcgaaaatttgtttgcaaaagaatatagattagtcaaaaagctcgcgattaatttcgtgggcttttaccataattatattcaaaaactagttctctttgaaaagtatcatcgtaagtagctgatactaaactatagtaaaattattgatatgatagagttaaaagagaaaacttatttggagtaaggtggaggaatttttgaaagataaaaaaattctaaaaagaattaattattgggttacaattggaatagttttaataatatgtataggtatttttacatggtggaataattctaaaaagaaaactccacatcataaattgaagcctcaacctgctttaattgacaacactagtactcgtccagcttcatatacaactaaagaattcaaaaatttattatcccaaaattatccagatatttataaaaacttgaattttaagcaaaaaccaactttctatgtgattcctggtttgattcagtcagcagcaattaaatatactcctcctggtcagggacaaccagggattgcatatgatatggatccacaaggcttagcgattattgaccataaatatttgattatttcagcgtatagtaaaagcaagacctttgattcagttctttgggtattagattttaagactggccgttttgtaaaaacaattgccttaaataatattgatcatgttgggggaattacttatgacgaagatcataagcgtctatgggtagccactattaatcaagagcaacgagctcaagttcaatctgtaacgctgaaagaaattgaaaaatataattttaagaaacagaaaaagccaataaaatttgagcatggtactaacttatcagcgccacttcgaacatcttatatgacttatcataagaaaaaactctatatcggctactttgataaggtcgaaggtggtcagctgtttgcctataaacttaataaaaaaggactatttaaaaaagataaaatgcaagatggtctagctattcctagcgaaaactggtcaacttattctcaaattcaaggaattagttttgataaaaatgatattttactatctacttcatatggtgatttaaattcccagctattaatctttaaaaataaactgaataagccaaactataatcttgatctttctgaagcagataaaaccattattttgcctccatatatggaacaaattattggtaaagatggtgaaatttatatgttatttgaatcagctacagcattttatcgtcaaaatcctaatttactgcatatggatcgggtaattaagttaaaagttaaattcaagggttccgaaaatagtaaggaatagctatcaagaggaataaatataaacatatattgaaaattaaaactcacaattaaatttgtgagtttttttatgttctaaatttagccgttcatgtctttacttttgccgcttattaaaaatgacgatacagttccgacttatttaagtattctttagttaaatcaaataaaggaagtaatcacatgcttattgaaacttatagtttaactaaaaaatatggcaaaaaattagctttgaataaggttaatctcaaaattgatcgaggtcaattggttgcctatcttggaactaatggtgcaggaaagtctacgacaattaatatcttaactggtcttttaaagccaacttctggaacaattaaatacgcgccaaatctaaaaattggggtagtttttcaagatagcgtcctagatgacaatctaactgttaaagacaatctgtatctaagagctaaaatgtacaaaactttctctaaggattggctaaagcaattaattgagctaattggaattaagaaatttttgaatcaaaaatatggtactttgtctggtggtcaaagaagaagagttgatattgcccgagccttaatcggtcatcctgatttgctgtttttggatgagccaaccactggacttgatttacagacaagattggtaatttggaatttactccaaaaattgcagaaagaacaggggttaactattttcttaacaacgcactatcttgaagaggcggaaaatgccgatcaaatgtacatcttagagaacggtaatattttagccaaaggatctgcaagtcaaattaaggccaaatatgcaccaactaaattgatagtaacgatgaaagccgctaaacagccgcttcattctcaaattcttaaagacaataaatttgagctagatgatctagattcaaatcaagcaattgattttctaacaaaaagtaaagttaaaattgcagattttgaatatcaccaaggctcaattaatgatgcatttatcaagattacaggaaaggaacttcaataatgtttgctttagttcaacgaaatatcaagatttatttttctaacatccctggcgtaattatgtcatgctttggagcattaatttcattctttatctatgtaggatttttacagaaaaatttagaaagctcctggcctcaaattgcaaatgtcaagcaaatgcttgatttatggatgatggcaggaattgtagcaattgcagggattacaacttcttttcaagcactaggtcaattagtcaaagatcgagaaacgcgcactgctgatgatatgtgtttgactgatctttctctttcagagcaaaatttggcctatgttttgtctagttcaatcatcagtttcttaatgcaaatcattacatttgtggtgatggatgtttactttacagctgttgataaaattaatatctcacttgaaaatagcttattagcgttaatttttatggcattaggagcagttggagcaacactgctcaatgaaataattgtgctctttattcattcttcaactacgtttagtcgtttatcggcagtcatcggggcaatcgctggatttgctgtcgctacgtatcttccttatggaactttgtcttctacggcgcaaactttggtaaaattagtcccaagtagttatgaagcttctgctttgagaagtttatttttaaatgaaattagcgaaaatcaaatgccagcgagtgtaagaagtacgatggttaactatttaggaattcatttcaaaattaatggctatcagctaacgcgtgcagatacaggctatgtgatgattggaatgattttaattttaagcctagtgattattcttgcttcactggcaataggaaagagaaaagttcaagttgaaggttaagtttcaaaaagatccatctttggaggatgagatagaggttgaagttagagcaagtgcagaaagtggcacagttaagcgactggtcagttacctaaataaatttggtaaaagagatcgaaatcttttacctgtgaaaacgagtgaccggatagttactgttaaaagggatgagttgattaaagttgaagttcagggcaccagcctaacttattacaccttgagcgaagtagtaaaaacaactggacgattgtaccaagttttggaaaacctgaatgaagattttgtgcaagtttcacgtcattctgtcattaatttgaattatttagaatcattagagagtggttttgcaggaaacatggttgcgattttagctgaaggattgaagactgatgtttctcgtcgctatttgccagatttagaaagagagctgggactgtaaaatgaaatggtttggaaaatgcatagattattttttcacaggaatgggatttggcgcaatttgctacgtatgtattatgacttttctttatcctggagtgggtttgactgttaaagaaacagtttcggttcttgggatttctggaataattggttttctatcgatgatttttaaaactgatttaccaatgagtgcagcttttgcgattcattttataggtacttttattttattcatgttgatggctactattaatcactgggtaattaatataagtagtatcgtaatgttcattcttatgtatgttgtgatttggctcatttgccttttggaacaaaaaaagacagtgaaccgaatcaatgataggattaagaaaagaaatctaaaatagaaaacataactgcgaggaaaacagatgactttaaagattcgtactgtaaaaatgaatgatttagatgcaattgttgagcttgaatcaagtgcttttcatatgtcagaagaaatgacgcgtaaggatatgatcgggcggattgaaaattactcagatacttttttagttgcggaagttgatgaaaaagtagtgggacacgtttttgggcccgcaagtaaagatcgctatattaaggatgagctctattttaaaaatcaaccgaataatgcacagtatccttatcaaacgattttgagtttggcaactagaaaagaatatcgtaagcaaggaatcgcatcagctttaattgaagaattatgtaagattgctcaagcgcaggatagaagtacagttacactgacttgtttacctaagctcttccatttttatgaaaagcgtggttttatcaatgaaggtaagactagtgatgatattccagatccagatgatgtaagtagttataacatggtgagagcgttaaaaatttaaatttttggaaatcaataagagtagatctataatttgaaataaaaaaggggggtaactatgagtaatgaattttgccataatggtatgaaatgtcaacagggatgtctatgcgctagtaaagatggtgtttgtcattgttccatggtaagtgagaaaaagtgcgcttgtcagagtcattgtaaagaaaaagaagagtaaaatcaaaaatctcatgttactaactcaatagctaacatgagatttttttaattctcggaatctgttttctaaaaattgataattactttcccaagactttttctttgcgcaacatctgccaaggcggcattgacttcagtaagggaatattgatttccaatgaggggatgaatttggttcttctctaaaatcttagcagcttccttgagctgttgaccattagcttgaacgaagatgaagtggtagttttggttgcgttttttggcttctttttcaattttgcgagcagctacattaaaaagcagttccttagctaatcccatgttcattttcttagcaaattctctatttggcatccctttcagcgaaacaatctcgccgccatctttaagaatagaaagttgcttaacagtttcttctccacctattgtgtcgatgattgcatccacattagcgacagctttggtataatcttcggttttataattgagaaatttttcaacgcctaatttttctaaaccagcacgactagtttcgtttcctgtagtaataactttgtagccttgcgcaattgctaaaggaattgccattgcgccaaaacttccggatcctccggagatgaaaagagtttggccagcttttagattcaaaagttgaaaagcctgcatcgccgttaatgcagttaaaggaacagcggcagcttcttgatcacttaagtattcaggaactttagccacagctttttcattaatcacaattttttgagcaaaagcgccaatgttatctactggattacgggcaaaaatacggtcgccaatcttgaagttagtaactttaggatcaattttttctataattccaacaaattcatttcccatagtttgaggtaacttgtacggaacaaccaatttaagatcaccatgagagataaggttgtctaaaggattaacggctgcagttttggttctgataagtaagtcatgtgcaccaagtggctgagaattaatatctcgaatttcaattaacggatcttttttatcgtatttaattagttgagctgccttcatgatttctacttctttctaattgtttcagtctatcaattacatctgctaaagtgtcgtgttgcaaagaatgctggagccttttttcggcatcatctaaaaatggaaagacggcgttaacaatgttgcgaccgacaggacattctgcatttgcattttggtgaacttgaaagatatgagggttctcttcttcaacaattttataaatagtgaggagatctaaatcaccaggatcgactagtaattgaattccggtttttccacggtggctctcgataattttatgatctttgagtagactcattattttccgaatataacttggattcgtgccaacgcttttcgcaatgtcaactgaattaattggatgtggactaagcgcaatcatagatagaatgtgaattgcaatagaaaatttggtatctttcatctaaaatactcctaagtacataatgtatctttcactgatacattattatataaaatgaaagacgtcaaataaaacagaaatagatttctagataagcaaattgttgtgattgatttacgatgattaaataatatattaagactaatgtatgaattctcttggctagaaataaaacaagacgtattattgcgaacgagacttttattttagtatttggcaaatttgaaaaagatttatgttggatatgcaactgataatttaagctgttttctatataagaggctaacaataaaaaataggaggagaatatgagaaaaaagaggatggaaaaggttagtcaattaactttgaagacaccaataggattactgcagataattgctactgatgaagcaatagtcagcataaaacctactggtcatgaagaaaatatagtgggaaatgaagcagcaaataagttagctcaagagtgtaaagtagaactaacagagtattttactggaaaaagaaaaaaatttgatcttcctttgaagcaagaaggaacacaatttcaaaagaaagtgtggcaagaacttaaacaaattccttatggggagacaaaaacttacggtgagattgctaaattaatagataagccaagggctgcgagagctattggaagggccactcacaataattcgattatgattttgattccctgtcaccgagttgtcggcgcaaatggaggtctaactggctatgcctatggtacgaaagcaaaaaagtttttacttgagcttgaaaggaaaaataaatgattgtactaataactggtgcatcccatactggaaaaactactctggcacagcatttacttgaaaaatataaatacccatatttatcttattgatcatttagagatggggatgagccgtactgattacaaaaagcttacatctgaagatgatgatcaacttacgaactgtttgtggccgattgtatgagaaatgattaaaactgcgattgagagtaaacagaatttaattgttgagggatgatatattccttttgactggcaaaattattttgatgaaaaatatttagagcagattaaatattattgtcttgtaataagtaaaaaatatatcgagaataattttgcaaatattaaaaaatatgcaaataaaatcgaaaatcggttagacgatagttgctcaatagaggatatcttagaagataatactcattatttacaaatggctaaaaagtatggtttaaactatgtgctaattaatgagcagtataagattgagattgatttggatgattagaaaagtaaaaactcagctggttaataagtaattaaggactaaaaagctttatatgtttttattgtctgctatatagagaaaatataagatattaatttttgtaccatataaaacaaaaaagctcccgttcaatttgaacgagaagctttttacttagttaatttatgtactttatgagccaaaaccatttctttgtttcgatcttcataaattgcgtcttttacgtagttccagggtgccattaggcgacctttattgtttttacggaaaaggaaatcagcatgatgattttcaaggtgacgtagatatctcttagcattttgaacctgagtgtgatgctttagatttaagcgaggttcaaaatcaataatcttatgatcggcattaaaaattggtcttactttatgatgccagtgacgagcactagcaacatgacgactaacttttttgccagcctccacaatattttctttagtggctaaactattccgatcttttaactctgcatgtggatccagatagtagttccctagaccatcttgacggtaaagacgtaattttttgaatgatttattttttttgtcagtcttcacttcaataacgtcaccattagtatggttcattaaatacatgtgatgttttttagtgtaatttacacttttcatgatcagaaattcacctctttatatatcttatgaatctatattatagacgcattttaaagtaaagtatagtgattaaagtaggactttagttatttataaaattaattaaagtttagagaaatagtagtaagaaaagacagctgagataggcttagaactgtcttttgtaagtatcgtaaggtcaactagcggataaaaattttttaagtcatgcagtaagtattatagctacagatgttttaaataaaagttatgtatataattaagagataagatgagttcttatctctttttttgtgaaggaattaagctatgatagataataaaaatttgttgaagctcttaagaactgaacttcaaaagatgaataacggtgataaaattagatttttaacttataagaaggatcgaagcattcttgtggaaaaggatggagatacttttacaataattgaaaatggatatcgccaaatggtgtgggaaaatttaactaaagcagaagtgttaaagagaatgaaaaagttacaaaagatagaattcccaagaagtaacaaattatatttaagtaagtaaaaatgacggactgtaaaagctacaatctgtcatttttacttacattctatttaattttgatatctccatcttgtgtagaagctgttaagacattagcgctatttttattctgtgtaaaagtatcgctagatgaatcacctttaactttgatgtctccatcatctacattaaggttatagccactaaaattagacgtagaaatgtgaatatctccatcatctgtgtttatcttaaatccatttttactatttaatttgttgatagtgatatctccatcgctggtatcaatttttccacttggagattttaaattgttaatatcaatatcgccatcatcagtattcaaagaaataggatttgtggtagcaatgttttccacttcaatatcaccgtcatctgttgaaagatttaaactcttcaataggtgttttggtacggtaatagtgatagtaggatctccgttaatgcggtgaataccagaggctgattgcttaattgttagactaccattctttctgctaacagtgggctttaaattcttaggcccttcatattcaacgttatacttatcgccatatttaacagaaatatctgttatggcagcagagacttttagttgattaaatccctgattactaatagtagttttaatttcgggtttattattagagttagagataataatactacaagctgaaagagtcagtacaagagataagagcataaaaattaatgcaaactttttactaatatttttcataaaaaactcctaagataataattaggactaattatcttatatttattgagtaaagtaaatttaaataaaaattggagggaaagataatgaaaaagatgccaccaattcaaaaaattttagaagcttacacagcaattgtggataaacatgtggaattaaaaaataatgaagctttggttacctcatcaaatggtgcaaagacctatacggtaagctgggataatgacatttaccattccaatgacaatgcgacttattggcaaggttatgcggggtatccgataattgcggttttgatgttgcaaggaaaaataccctttgatcaaaaattggctgataattttgcatcagttaattggaatgaagtgaatgcaaaatttaaacgtaattatgctaaagcggcctctgaagttatcaagaaaaaaggattagatgaaaaagaggttatggttgaacttgagagggtttatggagctttaaaggatctaccaatcacaattaaacgtggctcccttcgtccacctaaggctagtaagtaattaagaattatgagttgctcttcatccatcgccttaataactggaaaaagtgtctttcctaaatcagtcaatgaatattcatttttagattactgtataaacttcttcattaataatttttacttccagtctaagcaaagctcttgtttatgcagttcttcaggtaattcgtcacgatcagttttatgattatctagcttagcgccagtgatttgtttagtaaatgaatcaatacgacgatttgaatcacgtaaatcatagtaagtagtaactactttgtcatagtcacgtaattcttttacattgaagtccttatcatattttccttcaaaacaagtgaattttaatggtaaacgtggttttaattgtggcttttgatcaggcacgccaacttgcatccctaatactgggaaagtcaatttaggtaaatcaagcgtcttaagcatttcaagtggatgatcattaactgttccaaggggtacgtagcctaaatccatactttctacggcattagcaacattttggtaggcaagtaaggtatcttccattgcttggaaaaagatatcagtagtatgcacacgaccatcatccttgccaagttgttttctaatttgttgattacgatataaatcaactacaaagatgaataaatcaccttctgcaccaacatatttttgattacataattctctaatttttttcttctcctcaggatcaataatatgtatcaagctagcattttgcatgaacatactagttggggtttgtgcaaaaactgagtataaagtttctaattgttctttatttaaagttgtatctttaaattctcgaattgaacggtgatttaattgtgcatcaatagttttgttatgtatcatttttatccttcttgctaataattagtaagtatattatagcagatagttattattatttttctctttgtcattaattttggataaaaaaagatgcacagaagtatatacttctatgcatctttttatgtatttatttttgcttaatcaagtaagtcatattttaaggtcattaagccgtgaccttcgttaaccatatttcctagcaattcaacagtattgttgtaaactgtatcagccatcttttgatttgctttgtttagcttatcttggagttcatcgccagaatagttttcaatttctttatcagtttcatgttgaattttatggcattgagcaagactcttttgttcaaaatcggcttctaattcaccataaacacggaagttagtatcacctaattgagcagttaatttattcaaccagaagatcttatttaaatcaaatttaggaccagtctggaagctggctggagtagtagtgatattggtgtagaaaggaaccatgctgttaaaagtatttggtccaaatgctaaccattgaacaccagcaatttcttctggaacgtcatttctaatttgtaaaatatgagtttcaaagtttctattaataccaattggacggaaagtcttcttttgttcaggtgtaccttgatctccatatgcatcaaaaggagtatcttgatagtgagaactttcagcccatttaatgtcttcaatactgatcttgcgatttgcgtggcaaatgaatggttgatcttgatcacttggttcaccaccaaaattaggatcaaaatagttatggatataccaagcacgtggattgttgtagtgagcatctttaatcgttgaagagccaaagatgtgtcgcaagttatagccctcaagatctggatttaagtgatattcttcaattaaatcttttaaatcttttgatgaagcaaaatcatcattatcgaaataaaattcatcgatatttagacggttaggagcgattacgtacgcatcatctggaatacggcgagctgcccagtggtggccaccaatagtttcaaggtaccaaatttcgtctttatcagaaaaagccataccgttcatttcgtaagtaccatacttttcaagtaaatatcctacgcgttctacaccttcataggcagaatggatatatggcaaagttaaagtcacgaaatcttcttcacctaagccgcctttttcaaggagtggatcaataccttgaattcttgaattagtggtaatagtttcagttgcagtcatagcaatattatctgaattaataccagcagcagcccaaattccattttcacctgatgcatcaggtgcactagtatagcgaagaggattaggtagaagatcttcatcatcgatcttttgatgactaattacgctttcgtagtgtttaggttgatcagctggcattactacatcaaatcgctcaggaataatagtacggccgccatcttcactacgggctatcattgttgaaccatcaatagttgcatcttttccgactaagatagtagtacattcggttggtttcataaataaaatcctttctgaattctttacttactattgtacgcgaaaatgtaaggtcttaggaaataatctggcactagttaatgcttttctcgatagtatttgggactaaggccagtatagcgtttaaaagcttttgaaaaagtaaaggcatccgtatacccggtaatatttgcaatttgctgaatagcgtaattactgtttaatagtttttctttcgctttttccatccgtaattgggtaagaaatgcttgtggagaaaggttcagatttttcttaaaaatgctgtataagtagcttcgagataggtcgagatcattacatagagcactaattgtacaagtagaattagcagaattttgttctaaataattaaccgctagacgaaattcttcattagagtttttagctttagaatttaattcagcaggatattcggtgattaagtggtaaaagaatgtatagattaatgactcaattaatacatcgctagcaagggaactacggtagtgaagtgaatcgaaaagttgttttaggctttcgtaagtttcacttgtttgaagctgacgtaaataatattttttagtcaacttagaattgtctagtaatcccttgatttttacacctgaaaaaccaatccagaagtatgaccagggttcagtgccgtcagcttgataaaaacaaggtatatcctttggaagaaggaaaatatcgccagcatttaagttcacagcatggtgattagctaccgaaaaggttcctttacctgattgaatatagtgaatgacatagttgttacggacattattacccttgaaaaagtagtttggaggacaattttcttgtccaaaaaataaaactttagtctcaatactgtgattgtttaatgtatgatattcaccattcattgctcttgtcctcttatcaaattcccatgttaatgatggatatatgttttcaaaaatatatttagtacttataatgataccatttttacggtaaaacatatcattatgattaaaaacaaattgacataatctaacttaatctagctattttataaagcgtatacattctacataataaatattgttgaaagcgaatacaaaaaataaaagagggaagattatgaaagataaagatcagggaaaaatgtcactgggtgctagactagcatacagttttggtgcatttggtaatgattcattttatggattactatcaggatatttaattatgtttattacctcgcatttatttaatacaggtaatgcggctgaagatgccagaatgatcagtatggttacattgattatcatggtgttaagaattgtcgaattatttattgatccatttattggaaatgcaattgacagaactaagacccggtggggccattttagaccatgggttgtagttggtggtagcatttcagctgtgattttattgatattgttcactaacttaagcggactttaccaaaagaatgcaatcttatacatgattgtttttgcagttctatatatcacaatggatatcttttattcatttaaagatgttggcttttggtcaatgcttccatctttaacaactaattctagagaacgagaaaaaactgctacttatgctcgtgtaggatctactattggtggtgggttagttggaattctagttatgccagctgttatctacttctcagcccgtccaacttctacgggggatgatcgtggttggttcatttttgcagcaattatttgctcaattgcatttgtttctgcatggtgtgttggtttatttactagagaagttaacagcgatattcgtaaaaataagaaagatactaagggaattattggtatttttaaagctttatcaggtaatgatcaattaatgtgggttgcacttgcatacttattctatggggttgcaattaatattactggatctcttgaagtttactattttacatatattatgggaatgccaaaagcattttctattttttcaacgattaatgtattcttaggaattattgcgacatcattatttccacttttatctaaaaaaatgagtcgtaaggcactctttacttcttgtttagctgtaatgctttgtggaatgggattatttgcagtagctggaagtaatttaccactggttttgcttgctgcctcaatttttggctttccacaaccaatggtattcttaatcgttttaatggttattactgactcagttgaatatggtcagttaaaacttggacatcgtgacgaatcacttgcgttgtctgttcgtccattaattgataagtttggtggtgccgtttcaaatggtgttgttggtcaaattgcgattatggctggaatgactactggtgctactgcttcttcaattacagcagctggtaagcttaattttaaaataatgatgttcgctgtacctgctgttatgcttgtaattgcaattttaatttttgcaagtaaagttattttaagtgaaaagaaacatgcagaaatcgtagctgagcttgaaaagacctggggcaagaaatttgataaggatagtgataatgatgttgatagtgatgtcctcattgccactccaatttctggtgaattgataaatttaaatcaggttaatgacaaaacattctcatctggatcagttgggcaaggctttgcaattaagccaagtgatggaaaggtcctggctccatttgatgcgacagttagacaggtctttactacaagacatgcagttgggctagttggtgataacggggtagttctattaattcatattggacttggaacggtagaactaaacggaactggatttgtatcatatgttgaacaaggtcaaagggtaaagaagggccaagaattaattgaattctgggaccccactattaaaaaggctggtctagatgacacggttattgtaatagtaacaaattctgataagttttcagatattgacttaatggcgaaaactggtcaagccgtacaagcagaagataatattttagaattaaaagtaaagaaggaagagccagtattaggaggcggagaagttgaaccaactaattaattttgataaaaaaaataaagtttttcatttacataataatcaaatttcatacttattagcagttgaagatggaaatacacttgctcacgtgtattttggtaaaacaattaaacaatatcatgggcaattacgctatccgcgagtagaccgaggcctttctggtaatttgccgggctcactagatagaactttttcacgtgattctttaccaaaagaatacagtacagctggtgaaatggattaccatactccagcagcagtagttcgccaaaaggatggatctaacgccttatttttaacttaccatggttataaaattgtggccggaaagcccgatttagtaggattacctcattcttttgttgaaaatagtgatgaggcagaaactttaatagtcaatttaaccgatgaaaagagcaaaattaaatttgaattagcttatacaatttatcgtgattatccagtaattacccgttcagtaaaagttgttaataatggtgaagatacagttaatattgaaaaagttgcttcaatgcaaattgattttgttgatcgtgactttgaatcaattactttacctggtgcgcatgcacatgaaagacgagtagaacgtagcaaaatcaatcaaggtattcatgtttattcaagccatcgcggcacttctagtcatcaaatgaatccatttatggcattagttgatcctgatacaaccgaatttgctggggatgcttacggatttgtattcgtttactctggtaatcacaagtttgaagtggaaaaagaccaatttgctcaaactcacgtcaatattggcattaataattttaactttaattgggagttgaagccaaaagatagcttccaaacgccagaagtcttaatgacttattctaatcaaggtctaaataagatgagccaagcatttcatagcttgattcatgatcggattattcgtagtaagtacaaagatcaagttcggccaattttagtaaataattgggaagcaacttacttcgactttgatgaagaaaaattaaaaccaattgtagatgatgccaaagaaatgggtattgaaatgtttgtccttgatgatggttggtttggtcatcgtgatgatgataattcttcactaggagattggagtgtttttgaaaagaaattcccgcatggattagatcattttgctaattatgtccatgaccaagggttaaaatttggcctttggtttgagccagaaatgatctcaatggattcaaacttatatagagagcatcctgactatttaatgcatgttccaggaagaactccaagtccatctcgtaatcaatatgttctggatttaggtagaaaagaagttcgtgacaacatatttgagcaaatgaataagattcttgaatcaggtaagattgattacattaaatgggatatgaatcgtcacttgtcagatatttatgaagcagatttgccagctgcaagacagggagaaacttaccatcgttatgtcttaggactttatgatctgcttgaaaggctagttgatacttatccaaacctattaattgaaggctgttctggtggtggtgggcgcttcgatgctggtatggcatattacaatccacagatttgggctagcgatgatagtgatgcaattgatagattaagtattcaatatggcactagtttagcttatccacaatcaatgatgacttctcatgtttcagttagtccaaatgagcaaaatggacgaattacaccattcaatacacgtggaattgtggcaatgtggggtgatttaggttatgaactcgatttaactaagatgagcaaagaaaatcgtcaagcagttaaagatcaggtagaaaaatataaaaagattagagaagttacccaatatgggactttttaccgcttaaagtctgctcaaactagtaatcaatgtgcttgggaaacggtctcaaaagataaaaatgaagctgttttgtcagtagttaaggtaatggcaagtgctcaaccgtatttaactaagactaaaatggttggacttaatccagaaaagcactatgaagatcaaaagacccatgaaatatatggtggagatgaactgatgaacttaggaatttatgattcagttgaacacggtgatttcaaggcttatattcatcactttaaggcaatagattaggattagtagtaatgacaatttcaaataaagtaatgctcataacctatccagatagtttaggtaaaaatattaaagatttagatgacgtactgcacacagacttaaaaggtgctgttggaggagttcatttgttaccattctttccctcaactggtgaccgcggatttgctccaacagattattcaatggttgatcctcaatttggagattggtctgatgtcgaaaagttaggcgaagactactaccttatgtttgattttatgatcaatcatatttctcgtcagtctaagtactataaggattttcaaaagaataaagatcaaagtccttatgctgaccttttcctcagttgggataagttctggcctaagaatcgaccaacgcaaaaagatattgaccttatttacaagagaaaagatcgtgctccatatcaggaaattacttttgcggatggaagtaaagaaaaactctggaatacttttggtgaggagcaaatagatcttgatgttcgaaaagatgtaactaaacagtttattaagcagactttaaataatttgattgatcatggcagtgacatcattcgactagatgcgtttgcttatgctattaagaagttagatactaatgactttttcgtagaaccagaaatttgggatctattgaaagaagtacaagatgatatttcagctaaaggcgcgctaattttgcctgaaattcatgaacactattcaatgccatttaagattgcaagacatggttactttatttatgattttgccttaccaatggtggtgctttattcactatatagcggtaaaagtcagcgtcttgcttcatggctaaaaaagagtccaatgaagcagtttacgacattagatactcatgatggaattggtgtagtagatgctcgtgatatcttaactccgaatgagataggatacacaagcaatgaattgtataaggtcggcgctaatgttaaaaagaaatactcaagtgcggaatatcataacctcgatatttatcaaataaactctactttctactctgcacttggtgatgatgataaaaaatactttatggctcgacttttacaagtatttgcacctggaattccccaagtctattatgttggaatgcttgctggtaaaaatgatattgaacttcttgaaaagacaaaagaaggtcgaaatattaatcgtcattattatagtcgtgaagaaattcatgaagaagttcaacgtcctgttgttagttctttaattaacttattaagatttagaaataatgaagcggcatttgatttgaatggaagtattgaagttactactcctactgaaaatgaaattcatattatccgtttgaatcaggacaaaacacgaaaagcagaattacgtgcaaacttagaaaccttagcttataaagtgttagtgaatgggcgagagatggctttttaatacaaactataaatatttttgaagaagaattaggtagaaattgcctaattctttttttgaagcagatctagaaactaagtttatagacaatataaggtataatttgattaatgaaaaaattctgcaagcatgggaggaatcatatagatgaattatggagaaaaatcacctgcactttgggatgcaattaaaagtgaagagaaaagacaagaagatacaattgaattaattgcatcagaaaatattgtttccgatgctgtccgagaagcacaaggatctgttctcaccaataaatacgcagaaggatatcccgggaaaagatactatggtggatgtcaatatattgacaaggtagaacaattggcaattgactatgccaaaaaattatttaatgcagaatatgcaaatgtgcagcctcattctggttcacaggcaaacatgacagtttataatgctttgctaaagccaggagatactattttagggatgggtatggatgctggcggtcatcttacgcatggttcaaaggttaatttttcaggaaaaatttttaattctattagttatgacttaaatcctgaaactgaagaattggattttgatcgaattagacagcttgctatagagaagaagccaaaattaattattgctggtgcttctgcttatagcagaattattgattggcagaagtttcgtgagattgcggacgaagttggcgcctacctaatggttgatatggcgcatattgcaggtttagttgcaacgggagcacatccgagcccagttcctatagctgacgttgttacaacaactacacataaaactttgcgtggtccgcgtggaggaatgattctatctaacaataaagaattagggaagaaaattgattcggctctctttccaggaacgcaaggtggaccactagagcatgttattgctgcaaaggcacaagctttttatgaagatttacagccagaatttactcaatacattgatcaagtaattaagaattcaaaagccatggctgaagaatttaaaaatagcaaaaatattcgcgtggtttcaggtggaacagataaccacttgatgattattgatattaccaagactggtgtaacaggaaaagatgcccaaaatttgctagactctgtaaatattacgactaacaaagagtctattcctggtgataagcgaagcccatttattactagtggattaagaattggaacaccagcaataactagccgaggctttaaggaacctgatgctaaagaagtggctaaaataattattgaagttttggataagcctgaagatgcaggagtattggctgaggcaaaagaaagagttaatgatttagttcagaaatatcctattaaataaaagctattgacagaaaaatataagccaattacaatataattaaattttttaaggagtagttaattatgaatacacaagctaagtttatgaaaaataatcgttggcaaggccagtaaatcaggttgttaagcaagatgcaacctgaaagactcagattgtatctgtgctggctgtgtatttattgtggtctgcatggaataacatgcagacctttttctttttgtgataaaaaagtaacaggaatctgcatgtgaaggtagattcctgtttttttggagaaaaattatgaaaagaatgtatggattaattgtaattttagtagcttttttaaccatagctttttttggagaaaataaacaaaaagaagaaaataataaagttccccgagttggtgtattaacccttatgcgtcacccagctcttgatgagatatatcgcggctttcgagatgagctgaaagaagagggctacgtaaatgggaaaaatatcaaaattgactatcaaaatgcaaataatgatcagagtaatttacgtacgatggcaacaaaactaactgatgaacaatcaagagcgttagttggaattaccactccagctgcccaagcattagcaaatacaacgaataagattccaatagttttaggtgctgtaacaagtccaaaaactagtgggctagtaaaaaatgaaaaacatcccgaaaaaaatattactggggtatcagatgctgctccaattagacaacaactagatttaattagagagtttttacccaatttaaaaactttaggggtaatttatacttcgagtgattcgtctgcggttagtggctttcatgagattgaacgggaatgtaaaaagagaaaaatacctttaaaatctttctcaattgcaaatagtaacgatcttaatcaagtttcagagcagatgtttagtcaagtagatgccgtcattgtaccaactgataacacaattgctggagcgatggaaacactagttaaaaatggtaatgctgctaaaaagccaatttttcctgccgcagctactatggtaaaacaaggcggtcttgcaacttatagtgttaatcaatatgagttaggaaaaatgactggaaagatgactattgaaattttaaagggtaaaaaagttagttctttaccaatcgaaagagtgaaaaagggagaaccagttgttaatttaaaagaagccagagaattaaatcttcaagtaccgcaaagatttttagaagaatgtcagaaaaaaggagttgtatatagatgaacttgatcgtatctgctattggccagggattgctatgggctttgcttggcttaggattatatttgacatttagaattttgaattttgctgatatgaccgtagaaggaacctttccattaggtgcagctgttgtagtagctaatatttcacacggaatgtccccatacttagctactttcttagcccttttagctggaatggcagcaggtttagtaacgggattattgtatacaaaaggaaaaattccaattctacttgctggtattttaacaatgacggcaatttattctattaatttaagaattatgggcggttctaatatttcgttgattggtaagaagacattactcaacaatgaatttttagaaaatttaccccaatattttaatagtgttgctttgggtattgttattgtagtagtgattactggaattttaattttctttttaaatacagattttggtcaagcttttattgctaccggagataattcaagcatggctaaatcattaggaattcatacagattttatggtgatcgtcggattaatgctatcaaatggaatagttgccttatgtggagcattaattgcgcaaaataatggttatgccgatattaatatgggaattggaactattgttattgctttagcttcaattatcattggtgaagtagcttttggagaattgaccttaaatcagcgtttagtggcggtaactttaggtagtattatctatcgtttgattttactcgctgtactgcaacttggattttcagctaatgatttaaatttaatctcttcaattgtcttagctctatgtatgatgcttccacaattagaaaaagtcttacatttgaaaaagccagtagaaagaggtgtgaaaaagcatgactaagccaattctagaattaaaagatgtcaaaacaactgttaaaacagctgatggtgaaattgttccaattttaaaaggaattaatttagaaattagacctggagattttattactataattgggacaaatggagcgggcaaatctacactttttaatacgattgcgggtagtttaaaacctgatagtggtattcttcggcataatgggcaagatattacgaaaatgagtgaagaaaagcggacacaatttattggacgagtttttcaagatcctaagatggggactgctccgcgaatgactgtggcagaaaatttattactagcaacaaaacggggaaagagaagatttttaaagattagaagacttaagcaaaacttacctcgttttaaaaagctagctgcagttatgaataatggcttagagagtcgtttaaatacgtttgtagaaggcttatctggaggccaaagacaagctttgagcttcttgatggctacaatagaaaagcccgatattttattattagatgagcatacagcagctttagatcctcatactagtgaaaatctactagcagtaactgataagcaaattaaagaaaataaattaaccgccttaatgattacgcatcatatggaggatgctttaaaatatggaaatcgtcttttggtgttaaaggatggtcaagttaaagcggatattagtgaagaagaaaaaaagaatttaaaagtaagtgatctttatagttattttgaagattgatctaaaacctagggctggttgtcggttctaggttttttagttaaaataatttttaattgttttaagtatagatttaatttttataaagaagggatggaagagatgtgaataagggacacaaaataagtttattttcagcaataatgctagcccttaattcgttgattggatccggatggctttttggctcaggctcggcagcaaaaattgccggcccagcggctatcttatcttggatcattggtgcagttattattattgcgattgccttaacctatgttgaactaggaactatgtttcctgaaagtgggggaatgagcaaatatgctcaatatagccacggtcccatgcttggttttatcgctgcctgggcgaattggatttctttggtaaccttggtgccaatggaggcagttgccgctgttcaatacatgagttcttggccatggaagtgggcaaactggacacatcactttatgcaagatgggaatataactacaccggggctattattggtatttgtgttcatgattatttttactttaattaacttctggtcaattaaaatcatgacccactttactaacttgatttctgtttttaaagtactcttgcctacgataacaattattatgctgtttgcatctagttttcatcctgctaactttggtcacgatgtaaaaacatttatgccttatggaagtagagcaatctttgaagcagcttctggtgctggtatcattatgtcttatgacgcatttcagacaataattaatattggtggtgagttaaagaatcctcgaaagaacattattcgtggagttttaatttccatgtttgcgacagctgcaatttatattctgcttcaagtagcctttattggagcagttgatccaggaatgcttgctaaaaactcctggcatggaattgattttgcgtccccatttgcagatattgcaatccttttaggaattaactggcttgtgattttactttatatggatgcttttgtttcgccatttggaactggagtagcttttgtcgcaacagcatcaagagcacttgctgcaatgacatatacaaaacacttaccagcgtggttagggagacttaatagacgctatctggtgcctcgttttgcaatgattgcagatttaattttagcgatgattttagtaagtgtctttaggaactggaatttacttgcaacggtaattacttgtgcgactttgattgcttatttgactggtccagttactactattactttgagaaaaatagcaccagatttggaaagaccatataaacctaattatatgcgctggtttgctcctttaacttttgtattaactagtttggctatttattggacgatgtggccaacaacaattcaagttattctggttattcttgtgggaattccaatttatttctattatgaagttaaatatcaaaagaaagattttaaatcgcagtttaagcatgctgcttggcttttagggtatttagtatttatttctattatgtcttattgtggtagcgacggctttggtggacaaaactggattaaatatccgtgggattttctgttgattgcaattgtctccttgatcttctataaagttgcaattgatacaggactagaaaaagttgatccggcggcgataaaagtaaacgaaaaaattaagcttaagaaggactagaattaagtacactagtataaattagcttgaattatagttggaaaggtgctatccttaactagtcgtaaaataatctatgatctgaaatattggtcatggcaaaggagtattaaacaatgagaaaagggattcatccagattaccaagaagttgttttcatggactcagcaactggtgctaagttcgtagctggttctactttaaaaccagaagaaacaattgaattcgaaggtaagacttacccattagttcgtgttgaaatttcttcagattctcacccattctacactggcaagcaaaagtttgcacaagcagatggtcgtatcgaaaaattcaacaagaagtacggtatgtcttcaaagaactaataattcttggtttttaccaaaagagcagcccactttggactgctctttttttatgcttaacgtggtataattcttattgatatgcgtgagacctttttctgactgcgataagtcagtataataggagtacatgcaattttaggtaggagtaatttatttattatgaaaatgcaacttgctgagatcgctaaagcattaaatagttcagttaatatgggagaagacaaggtcattacatctgttgtttttgactcaagaaaagcaactcccaattctttgtttattcccttagatggtgcaagggatggacatgattttgtatctaatgcaatggcaaacggagcagaagcaaccctttggaaaaaaggacatgagggtatgcctactgatgtgccagttattgaagtggaagatccgctaactgcgcttcaaaatttagctaaatattacttaggtaaagttaatccaactgttgttggtattactgggtctaacggtaagactacaactaaggatatggttgcagctgttttatcaaaaagatttaacgtgcataagacacaggctaactttaataacgaaattggggtacctgtaactattttagagatgaaaccatctactgaaattttagttcttgaaatggggatggatcgtccgggacaattacaccatttaagtgaattagtaagaccagatgtttgtgtcattacaatgattggtgaagctcatattgagttcttcggtactagagataagattgcagacgctaaaatggaaattactgacttcctaaaggaagatggtaagtttatttacaatggcgatgaacctttactagaagagcgtgcagctaagattaagcaagaaaagagtacttttggttttagagaagaagatactgtttttgcgactacatttagatcttacatgcaccatgctacttttgaagtaaatgggtcaacacagcaatttaaaattccaatgattggaaaacataacgtctcgaatgctcttgcagccattagtgtaggccgccattttggtgaaaatgatgaacaaattgcccaagctttagctaacttcaccccaacagcaaatagaatgcaatggaagaagggtgatgtaggcgaagcaattatggatgatgtttacaactcaaatccaattgcggttaaggctgttacgacttcgtttggacaagtaatggtcgaagatggtgggcgcagaattgctgtcttaggtgatatgttagagcttggagatgaatcagctgatcttcatgcgtctcttgcagctagcttggatccagcaattattaatgaactatatttatatggtccagagatgaaaaacttatatgatgctcttgttgataagtacccagcagaaaacttgcactattatccacaagatcaaatgaatcatatgattgatgacttaaagaatgatattaagccagctgatattgtaatgctaaagggatcacatgggatgcatttggaaaaggttttagaccgtctcatgtaggaaggaattagatatttgaaattttctgaaatgaacttaaaacctgagattttaaaagctattaagcgttcaggttttgaagaagctacaccaattcaagaaaaaaccattcccctagttttggagggaaaagatgtaattggtcaagcccagacagggactggtaaaactgctgcttttggtttgccaattttacaaaacttagataagcaacacgattcaattcaagctattattattgaacctacccgtgaattggctattcaaacccaagaagagttgttccgtttaggtcgtgatgaaaaagctcgcgttcaagtagtttatggcggtgctgatattagacgtcagattcgtgctttaaaacaaacgccagcaattttggtaggaacacctgggcgtttgcttgatcatttaaaacgtggcacaattgatatttctaaagtcaaaacaattgttttagatgaagcagatgaaatgcttgatatgggatttattcaagatattgaaagtattttgaaatatgcatcaagtaaacatcaaacattacttttctctgctacaatgccaaagccaattttacgaattggtgaaaaattcatgaatgatcctgagattgtaaaaatcaaaggaaaagaattaactgctaatttaattgatcagtattttgtgagagcaaaagaaaatgaaaagttcgacattctatgtcgcttaattgacgttcaaaatcctgatttagctgttatttttggtagaactaagagacgtgttgatgaattaacacgtgggctacaagcacgtggatataacgctgctggaattcatggtgatctttctcaagctaagcgaatgagcgtgttaaagagattccgtaaaggtaagctagatattttagttgcaactgatgtggcagctcgtggattagatatttctggggtaagtcatgtttataactatgatattccgcaggatccaaattcttatgttcaccgtattggtagaactggacgtgctggtcagaacggaatgtctgtaacttttgttactccaaatgaaattggctatatgcgtactatagaacaattaacgcataaaaagatgatgccacttaagccaccaactgatgaagaagcatttaaaggtcagctaagtgcagctaataaaaaggtagcagaattgcttgatagcgatctttctaaatatactgaagaagcatctcaacttcttgacgattattctgcgattgatttagtggccgctttattgaaggacttgtctaaagatgcagatagtgtaaaagtaaaaattacacctgaaaagccgttaccatttaaatcaaagcatggtaataatcgaaactttaaacgtaatttcaaacgtggtggagatcgaaatgaacgatatcatcgtaagcctagtgcccgtaaaggtggtagaaagcatgatttcgttataaagaaaaaagattaatttttgttactggagagctgtagttgctacagctcttttttgtaatataatgtatcaatgtgtgaggtgaaaataatgattagaggcgtaggaattgactcagttgaagttgaacgcatgaaaaagatagttgaaaaaggcgataaatttgctaaaagggtattaactccgaaagaatttgagcaatatcaacaattaaaaggaaagcgcaaggtagaataccttggtggacgtttttctttaaaagaatctttttcaaaggcaatggggactggattaggcaaatatgttggttttcaagatattgaaacattatgggatgatttaggacatccagtaatgacctcgactaagttttctggaaatatttttcctagtatcacacatgatgatcatgagattataacagttgtagttttggaggaattaaactaatggttccaggaattcatcgtccagccgtagtaaaggtaaacttgggcgctattaaaagaaatctgaaaaatgagatggggcatctagagcccggtcaaaagatgcttgccgttgtaaaagcaaacggctacggacacggttcagtagaagtagctagagtggcagataaggtaggagcagccggattttgcgttgcaattttagatgaagcattagagttaagacgtgcagatattacaaaaccaattttagttttaggcgttgtttctcctgaatatgctccaattgctgctgtaaataacgtctcattgactgttccaaacttagaatggcttaaagaagcagagaagtatttaaaagatgcaaatttgcaattgaagattcatttaggtattgattccggaatgggaagaatcggatttaatgaagacgcagactttattactgctaatgagtttttagagaataacgataatttctttattgaaggaatgtttgcccattttgcttctgctgatagcagtgatgaaacttatttcaaacatcaatgtgaaaaatttaatcatatgaagagcttgcttactgtaaagccaaagtggattcatgttgataatacggcagcaagtatttttcatgacggaattaaaagtgatttagttagatttggtattggaatttatggtttaaatccttcttctaatcctaattctccagatttaaaatcaaatattaagttagaacctgccttgtcatttgaaagtgaattgactcatgttaagacaattcatcaaggtgatggtgttggatacggttcgacctttgttgcagatgaagatacaattattggaaccgtacctgttggttatgcggacggatttattagaaaatttcaaggtttcaaagttaaagtgggagatacatactgtccaattgttggccgaatttgtatggatcaatttatggttaagatgcctaaaaagatgccagtagggaccaaagtaactatcatttcttctaatcctaatgatcaaaataatattaaagctgcagctgattatgttgacacaattcattatgaagtggcttgcttattaaatgatcgtttaccacgtgtatattacgaaaattaaaaataaaagcttgtttaaccaattttggctaagcaagcttttttaactacagtaattaagataattagtcttttaattcaccaggtttttctgcgctacggattgttaggcctgattgaagatcttcaatttcggcaacaacgaaacctctcttttcaagtcggttgacgatagcagtcatagtttcgcgagaaacaccaataggaagagtaaataagttacgacgaactaattcaccagttttgacatctaaagttaaacaaccggcaatattactatatttagaaataatttttgccattttaactaaattaccacggtcattatctgagaggatggtcaaaacataagaaccatttttgatgttccaagcatcagaaagcatatctagcaaacgagcgtgagttaaaattccgtagaaatgattttcttcgtccaatacagcaatgtatggaaggtctttaatgttaaagaatacacggaagaaaggtgaatttaccttaattgttttagtagcgtttttaagcaagtaagttacaggtaaattcatgtcgccgccttgagatttatgacggtaaatgtgcattttataaatgtttccacggaaaatagttcctgtatcatctaaaatagggacacaacgaaagccggagtcttctaatatttttaatgcttcggcaagagtagctttttcattgactgtagttaagtaatcttttttatagacaagagatttaattagcatgattagcctccatacatctgaaatttacaagccattataccatagttttatataaaaattaaagtctgattaaacaactttaatttagaaaataaaagagcatccacaaaatgtgaatgctcttttacagaaaaaagttgtaattattattgacgaacctttacgccagtttctttgaaggctttgtccataacttcttttaattgttttgcagaagcttccatcttagcttgttcgtcagcgttcaatggcatttcaataacttgttccaagccgtgacgaccaacaactgctggagtaccgatgtgaatatcgtgtaagccgtattcaccatccataggtactgaaagtggaagaactctgtgttcgttgttcaagatagccttagtaatgaatgctaaagcagtaccgataccgtagaaagtagcacccttcttgttaatgatgtcgtaagccatatctgcaacttccttgtggattgcttcaagcttgttttcaccaacttctgggtgagcctttacccagtcgctaacttttacgccaccaacattgttgtagctccatactgggaattcagtatcaccgtgttcaccaagcatgtatgcgttaactgaacgtgggtcaacgtgttccatttcaccgataactttttgaagacgaccagtatcaagtgaagtacctgaaccgataacacgatccttagggaatcctgacattctccaagttgcgtgagttaagatatcaactgggttagcagcaactaagaaaataccattgaaacctgattcaacgattggttcaacgattgaagataaaatctttaagttcttgttaacaaggtcaagacgagtttcacctggtttttgtggagcaccagcagaaataactactaagtcagcatcttttgcgtctgagtattctgcagagtaaatagtctttggtgcaatccaaggagtagcgtctgctaagtcaatagcatcaccttgagttctttctttaacgatatcaacgatacctaattcttgtgcgataccttgttgaactaatgagaatgcgtaagtagaacctacagcaccgtcaccaacaagaataatcttatgaattttttcttctgacatttgctaatacttccttccatattagtgatttatttaacaataacgattatatcatattggaatttaaaaattaaaaataagcaaattgcaataataaattgaacacttttagttaagctgcttgatagattagatctaattctctttcaaagatttcatctggtgtatgataggccagtatctttcttggcaaagaattgcaccaggtttcaatattaatgatgtcttgtaaagaatagttagctattgcttctcccttaggaatgaatctgcgaataagaccattgtgtctttcaactgttcccttatcacaagaagtgtaaggatgggcatagtaaaccagtgtattggatactttttctaggttggaaagatctgcaaactctgagccattatcagtggtaatggttttaaaaatatcattccaatgttcgctgtattgcctttggagttctttaaaggcctgcatgacactgacagaagtcttgtcaggaatacgaagaattaaaaactcacgactcatacgctcagataaggttagcagtacctcatcatctttgctcttatgtccgagaactaaatcgcattcccaatgaccgaattcattacgtttattgatctctttaggacgttcttcaatgcttctgccaagttttttcttatttttgcgaatacgatgaagcttagtattgcgtttaagcttctctggcaagtcgtaattataaattcctaataagccttgatcaacgtaattataaagagttttggtgcagacaacatcgctgctagcgaattcgccaacagcagtagcacgattactgcacacatcaagcgaccagccatctttaaaaaaatgcttgtggacatagcgcatgaattgagctttcctgagaaagtctgatttgcgcccacaatttttacgatgagctttatatgcatcatgcccttgagtagccttatattttttgactttaccatgatacagttttacagtgccacgcttaacctcatagctgatagtagaaggagaacagttaagttcacgggcaattgcacgcaaagaatagccatctttcaaacgcaattgaataataactcgctcttcaaatgataaatgcttgcctttaacgtgctggttcatggtagaatgtaaagagtccattttgacctccaatagaaagtttttgtggttattaacattctatcaaacaggtccgaatggactttttattttttatcaagtgttcaatttaattttacaatcagcgaaaattaaaaatataattttaaagatctaattaattatttgtaagtaagcgtgtgctataatctcaagagcaataagcagatttagaatgaaatatttatcaaagaggatgaaaaagaatgaagttaattacaggtttaggaaatccaggtagaaaatatgatcagactaagcataatacaggttttatggcattagatcattacttagagaaaaatggtttaactctagataagaataagtttgaaggcttatggacaaaacaaaagatcaacggtgaagatgtaatttttcttgaaccgcagacttttatgaacgattcgggaaaatcaatcgcgcaagtagctaatttcttcaaaattaagcctgaagatattttagttattcatgatgatatggacatgccaattggaaagattagaattcgtgcaaatggtaaatcagggggtcataatggaattaagagcattatggcttgcttaggaacgaacaattttaatcgattaaaaattggaattcgccatcctgaaaacgaaagtgttgtttcttgggtattaagtccctttaataatgaccagcaaaaactgatggatgcagcttttgagacaagtgagaatgtcattaatgattttattaaagggaagaacgcccaatatttaatgaatcagtataattagaatgaacattacagaattaataaaaaaagataaagagttaaataattttattgaaaaagctccagtagaaaaaagatcgcttttaactggagtaaattcaggtgcttttgccgctgtactgatgcaaatgctaaaagtttggcagcagccattgattttagttgaagataatgaagaaaaggcgcagacgcttttagatgaattgggaaacttattgcctgatgatatggtatttagttttccagttgatgctacaattgctacccaaacggctattgcatctccggacgaacttagtcaaagattgcagaccttagagtttttagctgaaaagagagcggggattgttgtagtaacgcctcaagctttacagtataagttgagtgatccgagagattttactaaggcaaaaaagatatttaagcctgaggcagaattcgatttagataagttaactgaatggcttacgcaggcagggtatcgcagagaaagcattgtagcccgtcctggagaatttgctcgtcgaggagatattgttgatatttatcctttggatcaagagaatccgattcgaattgaattctttggggatgaagttgataccgtaaaggagtttgattcagctacacagcgtagtttagaagaaaaagacagtatttcaattggcccagctctagatcgagtattttcaccacataattttcaagaagcggtagaaaaaataaagcaggatatgagcgaatcaattgctgaagaagagagcgttaaaaatcattttgttaaggcaattgatttattagaagctggtggtttaccagataactatgcctttttaattgattatttacttccgcgatctttcaatttaattgattatttagataaagatggcttattactatttgatgattggcagtccataaaaaagaatgtagctgatgtggatgctcaaaatgaagcttttatttccgaagaaataaaagccggagcaatgctgaatagtcaaaaattacgccatagttttgagcgagttgttcaaaaatcaaagcaagctcagattttattctcgcttttccaaaaaggaatgggccgattaaaatttgatcaaattcttaactttaccacacgagaagttcaacagttctttagtcaaatgcctttgattaaaagtgagctaacacgattttctaatgaaggaaatacggttatcttgcaagctgattcggaaactcgtgccaagcaaatcgctcaaaatttagttgattatggtgttgatattccggttgtaaaagcagatcaacttttatcaaataaagctcaaataactgtaggtaattttgcacatggttttgctttacctagtttagatttggtttatttaactgaacgagaattattcaatcaaagaccacatcaccgcaaacgtgttaagactcttgaaaatgctcaacggttaagaaactataatgaattaaaaccaggcgattatgttgttcatgtcaatcatggtattggacggtttgaaggaattaaaacattagatgtagatggtaaaaaacgtgactatatcactattacttatcaacatcatgatcagctatttgtccctgctgaccaattaggtttagtacaaaaatatgtggcttctgaaggcagagttcctcatattaataaattgggaagctctgagtggactaagactaaaaaacgggttcagtcaaaagttgaagatatcgcagatgatttgattgaactgtacgcaaaacgtgaatctgaaaaaggatttgctttcagtccggatgatgatttacaaaaagaatttgaagatgcttttccatatcctgaaactccagatcagcttcgttcaattagagaaattaaggctgatatggaaagtccgaagccaatggatcgacttttagtgggagatgtaggctttggtaaaactgaagttgccttgagagctgcttttaaagcaattcgggatggaaaacaagttgcctttttagctccaactactattttggcgcaacaacattttgaaaccatgcaagaccgctttaaagattttccagtcaattgtgcgcttttatcacgttttcaaactcctgctgaagtgaaggagatagttgaaggtgtaaaaagtggcaagattgatatggtcgttggaacacaccgcttgctctcaaaagatgtccaatttaaagacctaggcttgttaattattgatgaagaacagcgatttggagttaagcataaggaaaggctaaaagaattaaaagccaatatcgatgttttgactttgactgctactccaatccctcgtactttacatatgtcgatggtaggagtacgagatctttcagttatggagacgccacctactaaccgttatccaattcaaacttatgttatggaagaaatgccaagtattgttcgtgaggccgtccttagagaaatgaaacgtaacgggcaagtatttttcttacataatcggattgatgatatcgataaagttgttagtcaattggaagaactgattccagaagctaaaattgaatatattcatggtcgcatgagtgaaaatcaaatggaagatattatgtatcgtttttcaaaaaacgaatttgatatcttggtaacaacaacaattattgaaacgggcgttgatatgccaaatgttaatactatgattgttgaagatgcagatcattatggattaagtcagctatatcaattacgtggtcgaataggcagaagtgcccgtttagcctatgcctatttcctttatcaaccaaataaagtcttaactgagattggtgaaaaacggcttagtgcaatccgcgactttaccgaattaggatcaggctttaaaattgccatgcgtgacttatcaattcgaggagccggtaatatgcttggaaaacagcagcatggcttcattgatagtgtcggctatgatttatatgctcaaatgctagacgaagcaattaagaaacgtaaaggtaaaaaagttgcggttaaatctaatgcagaagttcaatttaatttggaagcttatattccagatgattatattgcggatcaagaacaaaaaattgaattctataaaaaaattaaggggatcaatcatcaaaaagaggcagacaatatcgcagacgaattaattgatcgctttggtgattatccacttgctgtagaaaaccttttgaatgtatctacgattaaggcagatgcagatttagctcaggttgtgtcccttactcaaaaatcagatgataagttacaagtcatttttaataatcaggcgagtgaggaattagaagggccgaatatttttaaggccttagaacatgtttctctaagagcacgaattaatatggatccgcaaaagagattgaatgtaatgcttgagcttgagaaaaatatgagtactagacaattatttaatgagcttcatacattcttagaagcagctagtgagattgttcaaaaataaggagaatagagaaaataatgagaatcgataagtttttaaaggtatctagattagtgaaaagacgtactgttgctaaagaaatggctgatcaaggaagagtaaaggttaatgaccgagtagtaaaatctagttatgatgttaagttagacgatgttattgaaatcggattcggtactaaacaattgaaagctcgtgttcttgacttaagagaaacaactaagaaggcagaagccagcgacttgtatgagctaattgattaatgacaagggaagagtaaggtgttatattaataacaagtggtgatataattaagatttagaatattaacgaaaaggcagggacataagtatgcagagagggccacgactttataatgccttaagcgatgaagaacgcctagcacgtttgcgacgtaaagcagctagaaaagaaaaagaggttcatcgtgtaaggaagaaccgaattattgcttgttttgcaattgcaattttaatttttggactgcaattaattatggtccatgtgcaaactggtagaattaacagtcaaattcaaactaataaagcagagttaaaccaggttaacaaaaccaataaaaaattaaaatcacaggttgcagacttaaaagatcctgattatgtggctaaagtaattcgctataagttctattattctaaatctggtgaatcaatttatactcttcctgaaaaagaggaggattattagtgaaatttccaattggattaaggctcaatgctaaagtgaataatattactaaacttgggatttttgtaactttaccacatcgacatcatggtttgattttccataaagacttcggtgataagtgggaaagtgctaaaaagaagtatagtgttggagacgaaatccgtgttgtcgtgatcaataatcatgaaggaaaaatttctctatcattgagtcaggtaaataattctgatttagttgatccaactaatgaatttaaagatagcaaagattttactccactagctaaattattagagaaatctactgataaaatagctaatttaaaaaatcaattgaatttaagtgaccggtaggggtcacttttttaatctaaaaatgacaaaatttacaactttttttactgaaaataatattgaaataaaaaataaaaaatttttactggctgcaagcggcggtccagattcagtagcgttgctgaagatgttggttaattttttacctaatccatctgaacaattgattgttgcacatttggaccattgtctaagagatgatagctttttagaaagccaacttttacaaagattaacttcagcccttaaagtaaagctagtagaaaaaaagtggccagttgaacttcatccgcaagctggggttgaagcaaaagcgagagagtaccgttatgcattcctggcaaaggttggaagaaagtatcaaactgattatcttttaacagcacatcacggggatgatttaattgaaaatattttattgaagtttattcgctctggggatgtagctgaaatgaatagtcttcaaattgtgggaaatctcggttcaatgaaattgttgcgccctttagttaaatattctaaagatgaattattgaaatatgataaggaccaccatcttgatttcattgaagataaaactaattttgaagatgacactttaagaaatcgtttgagacatcatgttgttccattattaaagaaagagacaagtcatctagttaaaaatgctaaccactttagtgagagtgtagcattactttcaaagtgtcagagtgatctctttgatagtttaccttctccaataaattttagtaaagcgctacggggtaaaaaggaagatatagctcggttaaatacacatgaagcggcagctttttttgattatttaatctataaaaagtggcatcaaagaatccattttgatgaaattgacttgaataaaaatgtgattttcaataaagaaaattttcaattgcttttttatcaaaaatattactatttgattaatagaaatgaattagctgtaattgatcctaaaagaaaactagttaaattaaatgaaaaattttcttttaacggaaaaaaatatttaattacccaggatgaaaagtcacaaaaattggctggttatttttatggcgaaaaagcaaagtatttagaggtagggagcttgccacaaggtagtacattaaagttagctacaggaaaacaaactaaggctaagaaaaaatttgctgaaaatgggattcctttagctttaaggccgtattgtttgacagtctggcaagaggaaaatccagtctatgttgaaagtgtttatcaaaatcaagaatataaccccaattttatacgctataatgtatatatttatttttaagtttatgcaaagttctatggtaaaagcataatttgtggtaaaatcgttggagtaattccaagaagtgtcgcggaggttaatagatgaaaaatagaagaaatagactgctttctaacggtcttttctatatcatagtattcgtgatcctcttggctggaatcaattgggccgtgggaggctccggtagtaatggttccacagaaaatatccgttattctcaattagtaaaagatttaaaagcgggtaaagtcaagagtatcaatgtacaaccatctaatggtgtatatacggttactggatcttataagaaagctcaaaagtcaaataatcaaaataataatggatttggactaattccaagttcacaaagtagtaatgaagtaacccggttcagtactacgatgcttcaaaatgactcaatggttaagacaatttccgatcttgcccaaaagagtggggcatctatttctggacaaggtgaatctcaatctggaacctggatctctacgattgtgatgcttgtcccaactttgatttttattgtcatgctttggatgatgatgaatcaaggtggacaaggccgtggcggcggtatgatgaactttggtaagtcacatgttaagccacaagatccaagtaaaaacaaggttagattctcagatgtagctggcgaagaagaagaaaagcaagaattggttgaaattgttgaattcttaaagagtccagcaaaatatactaaattaggtgctcgaattccggctggtgttcttcttgagggtcctccaggtactggtaaaactttacttgcacgtgcagttgcaggtgaagccggtgtaccattttattcaatttctggttcagactttgtagaaatgtttgtcggtgttggtgcatctcgtgtacgtgatctgtttgaaacagctaagaaaaatgcaccaagtatcatctttattgatgaaattgatgctgttggacgtaaacgtggtaatggcgtaagtggtggccatgacgaaagagaacaaactttaaaccaattactggttgaaatggatggtttcgaaggtgatgaaggtgtcattgttatggcagctactaaccgttctgatgttcttgatcccgcacttcttcgtcctggtcgttttgaccgtaaggttttagttggtcgcccagatgttaaaggccgtgaagctattttaaaggttcatgctaagaataaacctttagcccctgatgttgatttaaagaaagtagcacgtcaaactcctggcttcgttggtgctgatcttgaaaatgttttgaacgaagctgctttagttgctgctcgtcgtaataagactgaaattacagcttctgatattgatgaagctgaagatagagttattgccggcccagctaagaaagatactgttatttctccagaagaaagaaaacgtgttgcctaccacgaagcaggacacgcaattgttggattggttcttagtgattcaagaactgttcgtaaggttacaattgttcctagaggccgtgctggtggatataacatcatgcttccaaaagaagatgaaaacatcatcactaagaagcagttgatggaacaagttgctggtttaatgggtggtcgtgctggtgaagaagtagttgtgggcgataagtctactggtgcttcaaatgactttgaacaagcaactaacatcgctcggggtatggttactcaatatggtatgactgatgttggtatgactgagcttgaatctccaagtatgcaatcaccttatggaactaagccatatagtgaagctacagctgctaagattgatgaagcagttaaagaaattcttgatgaaggtcataaacaagccgttgatatcattaagagtcaccgtgaaactcataagattattgctgaagccttactcaagtatgaaactttaaacgaaaaacaaattctttcattattcaagactggtaaaatgcctgaaaatgatgaaaatgaatttccaagtgagtctaaagcttcaacttatgaagaggcaaaagctgcaatggaaaagaaggatcaacaaagagaagaaactgaaaacaaggatgataaagaagatattcatccacttcctgatgatcataagaatattgataatattcctcttaatccaccatctgaaaagaatgaatctgatgatcatagttcagatgaaaacaaggatgattaagagtttattgtaagagtgatgtttaaactcctttctaatactgaaattacagattttagaaaggagttttttggtattaagaatgaaatatttaagtaaaaaagaaaaaaagattttaaaggtaagcctaataagttgtttaacaactatagttctctttttccttttatctactttgaccgattgtaacccaatctttgggggagttctgtatagtggggatttaccaaatcaatatttgtccttctttcaatattatcgtcatttaatgctcggtaattggagtagcgcaggatttagttttctcaatggtttgggtggagatatggccggaaatattggctattatcttcttagcccactcaattttattgtgttccttttcccagcaagtaaaatgaatattgctgtgtatattattatcctgatcaaattaggtttaatgagtggaacctttacttggctgactctgaaatggtttaagtttaagtatcaagcatatcctgtctttttaggaattgcttacggcttgagcggctattcgattgcctatgctggaaatgtaatgtggtttgatggtttagtcttacttccgttaatttcctatgcattgatcagaggaatcaggaagaatgtttggctggcttacagtattttactagcatgtgctatcatttttaattactatattggctacatgatttgtatctttttagtaatattgtttttggcatatacagttaacaattttgaaaatcgcaaaacttttcttcatcaatttaccggttttgcaattagttcaatcattagtgggttaatcagcgcagtagttattctaccaactttctttaacctttctagcaataagttgtctcaggcagactttaattctaattttgaaattaaaactttaattagtggcggaaaagctgtttcacgattatttattggcgatacttacaatgattgggcaccaatttttgttggtacgttagttttaattgtatttattctttactttattgatggacgtaactctatcaaagaaagaattactaatctagttattggactattttttgtgttgagtattactgtgccaaaaatctatctcttttggcatggtggtcaacaaactattgcttatccatatcgttttggatttattattgtattctggtttttacttttggcggcaaaagaactctctaatttaagtgagtatcgaaaagaaagtaaaaacgaaagactcattgctgctggaatttacttacttgttagtttagcagctgtatatattcgtcgtagaattggaccatggaatggttatgcttggctggcagttgtcctagtaattatatttggaatcttggtttatttctctgataaacgatttgttcgtgtaactttattattggtaggattagttgaattagccggtaatgcctatattgggttgaatcatctcggaatgaaaagtggagcatatccatcttatgtgtctgagaatcagagtattatttctcgaattccaaattctgataaaacgggtagattggctaaaaactatgaactaaataatgatcgcggtgagggatacacttttaattaccgggggatggaagaattttcatcaaataatgattctcgcattagttcattaatgactgatcttggtttttcaacttttcgttatttctactattatcaaacaggtactgtagtaacagatgctatttttaatgtaaaaacgtttattaatagttcgctttctaatcaaagtgtttcaccagaatacattagctatggtttgagaaatgatttaaagaatcatcctgtaattctaaaacagggtgataagacggcctatcgaaatgaaactttaccttttgcctttgcaggtggtttagctaataagctgaagtttaaagaagaaaatccagtatataatcaaaatttggttttaaattctttaactcaaactaaaaaagatgttttgagctatagctctaaaaatgctgaaattaattctaagaatataaatcttaaatttaagaaaggtaagtttaaagctaagagaacttccgaaaatcctggtactataacctttacatatagcaatttgaaacctgatcaagttggttatatccgctttagtaagaatttaatggagcagattgtggttttaaatagctatcaaatgaagcaaaagccggattaccgtttaccatttactgtctcaattaatggaaaagatgttcatcttcaacaatacacagatcaacttattggagttcaagctgataaagacggaaaactggtagtgaagatgactttagacggaaagtcaaatgaagttgagtttaaatatccacgttttgtgaatattgatcaaactgcattagaagataaggttaaaaaagctcaaaataatcgcatgaagttttctgcgtttagggatagctatgtagctggaacagtaaagactgataaaaatgaaaacttagcaaccaccattccttacagtaaaggatggcgagcagaagttgacggaaaaccagttaaaattaatcgaactttgaaagtgtttattggcttaaaattaaagccgggaacgcatcaaataactttcaaatatagaacacctggttttgtcatcggtgctttactaagcattatcggtattattgccttagctgtatatacggtctatctaaagaaaaataaaacatctattagtcagaaaactaataaataggtgaaataaagattgtacacccctctaaaattagaggggtgtatttagaattaaggataataatgaaaaagttgagtaaagaaaagaaaaatattctgaaactgtgtttgataagtttcggaataactatagcgattttcctaattgtatctagtttggcaaattgtaatccgtttttaggtggagttttatggggtggagatttaccagatgaatatctgtcattttttcaatatcttcgtcgtttgattttaggaaactggagtagtttgcaatttagttttgctaatgggttaggcgcggatatggctggaaacattggttactatcttgctagcccatttaatttactaattttgttattcccagctagtcaaataaatttagcactttatgtaataattattatcaaattaggtttagctagtgcagcatttacatttttaatcttaaattttttcaattttaaaaatcagatctattcagtttttctgggaattatttatggattaagtggatactgcatcggatatggagcaaatttaatgtggctcgatggagtaatcctattaccattaattatttacgctctgatcaaaggtttggttaaaagacactggactctttatattgtcttgctagcatgtgccataatttttaactattatattggctacatgatttgtatcttcatggtaattgccttttgtgcttatacaatcaataattttaaggataaaaaaatattcatccagcagataattgattttgtaataagttcactaattagtgggctaattagtgcggttattactttaccaacctggatgaatctatctaataataaatttgctgaacacactatcaatgaaggttttagactaagtccagtttcttcaattgctaaaagcatatctgctctctttatgaaaaatacctttaatggatcgccccttttatttattggtactttagcaataattatttttattttgtactttattgataataagaattcaaaaaaagaaagaattattaacttagtgattggtttagtttttctactaagtttggttcaaacaaaaatctatcttttctggcatggaggacaaaaaccagttggttttccatatagatttagttttattattatcttttggattttattattagctgcaaaagaattagcaggttttgatttaaagaaaaaacaacttctattagcatcaggaatctacttcgttgttggacttttagtgactgtcttaagactgcactatggaaaatacgatatgtatatgttggtttcgctgggcttaattattttgtttagtattttactttatttttcagaccataaatcatttcgttttgttctcgtgatggtaggagtagtagagattgctattagtagttatcttatgttggatcgaatagggatgagaagtaatatatactctaattatgtaactgaaaaccaagagttatttgatcatttgccagctagtgttaaaagtaaaagaatagccaaaaattattttttaaataatgatcgtggcgaaagctacgcatttaactacaaaggagcagagattttttcttctaataatgatcccaaaattagtaaattatatgctaacttaggattatcagcatatggttattattatttctataaaaccggaacagtagtgactgatgctattttcaatattggtggttttattgataattccttaccaagtcagagtatctcccctgaatatattagttatgggctgagagatgatttgaaaaataatccaattttattaaaagaaaagcagtacacagcatatcgaactgatacattaccacttgtttttgctggtaatttatctaataatttaaaatttaagagtgatgatcctgtttataatcaaaatctagttttaaattcattaactcaaactcaaggaaatgtcttaacttatagtccaaaagttgcaaaaattaaagtaactgatagtaagttgaatcaggaaaagaagaagtttacagttactcggacatctgataaagagggaagtgtaacttttacttttgacggtttgaagccaaaagaaacggcctatgttcaatttggtaaagatttaatgggatttgcggatccactaactacttatcatgcaagtcaggatggaaataataagcctgaattaagcattaccgttaataaaaaagatgttcgacttcaaccacaagttaaacaactaattggtgttcgagcaaatcaaaaaggacaggtccaaattaagtggagcctagcaggaaataaacgaattctgactagtgaaatgccacgtttagtaaatattaattcaactttattgcgctctaaagtctcacaagttaataataaaaaacagatgcacttaacaacttttagagataattatctatcaggaaaaataaataccactaaaaacgaaaatctggtaactactattccatacagtaggggctggaaagtaaaagtagatggtaaaccaattaaagtgagccgaactttggatgtatttattggtttaaatatgaaacctggtaaacatactgtagtaatgagatataggactcccggattgcttattggagttataacaagtatcataggtataatcttactagtggtatttaatgggtacttggaaaagaaaaaatattagtcaaagaataaagtctataatttataggctttattttttaggaggaagaaaaaatgaaagattatttagtaaaagcaattgataaaactaaaaatttacgattaattacggttgatgctaaagatttagtaagtgaagcacaaaaaagacatgatacttggagtgcatcttcagctgtgcttggaagaacacttattggaggattactcttgtcagcagctttattgaaagataaagatgaattaactgttaggttacttggaaatggtccagtgggagcaactattgtaacagcaaaagctgatctaacaattaaaggatatatccaaaatcctcatatagcccttccacctaaaaaagatggacatatcgatgtggcaaaagccgttggaaaagattggcttgaggtaaccaaagatcaaggtttgaaggaaccatatacaggtcaagttccaattgttagtggggagattgcagaagattttacatattatctagccaaatcagagcaaattccttcagctgttggtctatcagtatttgttgagcctaataatgagattggggcagctggcggatttattttacaggcattacctggagctactgatgagcaattggctgaagttgaaaagagaatcaaggctcttcctaatctttctactttatttttagatggaatgacacctgaaaatttggcagagagaatcttagggactgattgtaaaattttagctaaagaagatgtttcttttgcttgtgattgttcgaaagaaaaatatagtcaaatcttggctaccttaaaaccagcacaattaaaagaaatgattgagaaggatcatggcgcagagttagtttgtcgcttttgtaaagaaaaatatcattttactgaagatgagttaaaagatgtccttaagaaggcaaattaaagtggtgtgtaatgaatagttttgctatgatattagggtatttgaaagggtgagcaagtgtgaaaaacgatagttggaaaattagggatgttgaaattcctaatcgtgtagtagttgcaccgatggctggaatttcaaatgctgctttccgagtagtatgtaaagaatttggtgcaggcctagtagtgtgtgaaatgatttcagatcatggaattatttatcgcaataaaaagaccttggaaatgttaacggttgatcctcgtgaacatccaatgagtattcaaatttttggtggtagtgaggaaactttagttgaagctgctcattatgttgatactcatacagcagctgatattatcaatattaatatgggttgtcctgtaccaaaggtaacaaaaactgatgccggagctcgttggctattagatccaaataagatctatcaaatggtccatgcagttgttcgtaatgtaagtaaaccagttactgttaaaatgagaacaggctgggatcaaaaacatatttttgctgttgaaaatgctttagctgctcaagaagcaggtgctagtgctgttgctatgcatggccggactagaaagcaaatgtacatgggcgaagctgactgggaaactttgaaggatgtagcagatgctttgactattccttttgttggtaatggggatgttactactcctgaaaaggcaaaagcaatgttagaagatgttggagcagatgcagtgatggttggtagagcggctttagggaatccatggattattaaagatatggttcactatttggataccggagagaaactacgtccacaaactgttgaagaaaaagtagaaactgctaaagatcaattaaatagattgattgatttaaagggagaaaaaattgctgttcccgaatttagaagacaagcagcttattatttaaaaggaattccccgttcagctcgaacccgtgctaaaataaatgatgtttggacgaaaaaagaagtttttgacttgttagatgattttgtggaaaaatatgaagcgagacaaaagcaaattaaccaataaaaggagtttttagagtggcaaagaatgaaatgaacgaccaactaatcgctcgtcgtgaaaaaatggacgaaatgcgtgaaaacggtattgaaccttttggcgtaagaaaatttgatcgtcaagacttagctcgtactttgaatgaaaagtatagtaatgaagataaagatgaattaaatgctgatatgcctatgactaagattgcaggtcgtatgcttgcaaaacgtggtaagggtaaagttggatttgcagatctttatgaccgtactggtaaaattcaaatttacgtacgtaaagatatcgttggtgaagataactacaagatttttaagaagtctgatattggtgactttttaggtattgatggtgaagtaatgaagaccgatactggtgagttgactattcgtgctactcacattactttcttgtctaaggctcttcgtccattgcctaataaatgggatggtttaaaggatgttgaacaaatttatcgtcagcgctaccttgacttaattacaaatcatgatagttacatgcgttttgttcaccgtactcaaattattcaagctattcgtgactatttgaataatagagatttcttagaagttgaaactccagttctccacaatattcctggtggtgctgaagctcgtccatttattactcaccacaatgctttggatattgatctttacatgagaattgctttggaacttccattgaagcgtttaattgttggtggtatggaacgtgtttatgaaatcggccgtgtatttagaaatgaaggtcttgatactaagcacaacccagaatttactgaacttgaaacttatgcagcttactgggacttccatgatgtaatggatgaggcagaaggaattattagagcagctgctaaagttgtttcaccagatggtaagattacttaccaaggaactgatattgacttaggtaagccattccgccgtgttcacatggttgatttaatcaaggaaaagactggtgttgacttctggaagccaatgactattgaagaagcaagaaaagttgctgatgaacacaacgttcactatgaaagctactggaaggttggccacattattaatgccttctttgaagaattcggtgaaggatcaattgttcaacctacttttgtttatggacacccagtagaagtatcaccacttgctaagaagaatgctgatgatccaagatttactgatcgttttgaaatcttcattatgggtgcagaatatggtaatgcattctcagaattaaatgatccagatgatcaacgtcatcgtttcgaagaccaaatggctgaaagagaagctggtaacgatgaagcagatatgattgatgaggattaccttcgtgctatggaattcggtatgcctcctacaggtggtctaggtattggtattgatcgtttggtaatgcttttaactgatgctcctgctattcgtgatgtcttactcttcccaacaatgcgccctgaaaaggttgaaagtgttgaagcagaagttcaagaagatttgaagaaaaagaacaaatagtttttgctaaatagactgtcgtaaatgacggtctatttttttaatattttttcaaaaaatacttgcaataaaaagatgttttgctatactaataaatgtactgcggaagtagttcagtggtagaacatcaccttgccatggtgggggtcgcgggttcgaatcccgtcttccgctccagtataaaagactcaccgaagtgtgagtcttttttgttattcgggatgtggctcagcttggtagagcgctacgttcgggacgtagaagtcgcaggttcaaatcctgtactctccttatttgattaaaagaatgttgatatagcaacgtttagaacactaaaaatactagaatggtaacattttggtaacataaagaaaaaatgcatccggaagggtgcattttctttatatatttaattgttttaatgcattaactgcatcttctttatttttattatttacatgcgtataaatatctaaagtcatttggatattttcatgaccaagcagcatttgaacagttttaggttttacattagtttccgcaataagtagtgttgcaaaagtatgtctaaagccatgaactgttatatgacgtaaatcaggttgtggttcttttaagttgtgtgtttttgcatacttaactttttcctcatgatctttagcataaattgatttaagccattgatctggtttgctcatttttaaatacgttcctttaattgtgtgaaagagcttgttagagatgattttttgcttttgcttataatctatcaaaacttcttttaaactgtccgagatgggcaaaatacgcttagatttaggtgatttaggtggctggataattgttttattgtctaaaccatatgccaaggttttatttatggataaagtacctgcttttaaatcaatatcttgccaagtcaaagctaatgcttcggattttctaagaccggtagcagaaaggagcttgaagtaagtatattgaactaatccatactctttagccacttcaagaaattgatttagttcctctcgtgtataaacattatgttcggtatctctacgtggtcgagatgtctttttagggataatgatccgctttaaaggattttcagacacatagtttaaccgaataccatattcaaaaagagcattaaattcattaatagcatccctatatttaacaatttgttttgctttcctatcagcccacttttgtaattcagctactgtaatcttgtcaacgtattggttaccaaaatccggaataacatggttatcaaagacctgcttatttttattcgcagtagattcttttacctgagttttatagttttcaaaccatagatcacgtaattcagaaactttaatctgtttttgttttacaaaattatctggtttagtttgagataatttgttgaatactgcttctgcttcagcataggttttaaaaccacgccgatgaacttgaactcggtcaccattgctgttttgacccagtgaaataacaaattcatatcgtttctttccagattttaatttataatctttgatactggtgttttttctttttggcataataaaaaacctcctattgtagtctaaatgtgaactctgctacaataatagggcagagttcatatttttatggctttgttaatcgaatttatgttgagctattgacgtagctcatttcttcccactgatgttggcgcatcggtgggattttttatttacttagataaattatctacagcatattgtgcttcttctggagtaaatttgtccccagaattagaagttaattgatctttaatttctgctgtagacatattcatatctttttggtaagttttagcactttctaaagcatttttattccaatcagctttaacatgatcaacagcatattttgcagcatcttctgggaatttatctccagatttggaaattagttgatcataaattgcggccttagacatatgcatatcgtttgcgtatgtttcagcgcttcctaaagcagcggtaaattctcccgaaactttaggtttagtagatgatttctgcgattgagcctttgaagaagttttttccactttatcagaacttgatgaagagtcgtcatcagagccactcccgagtgcaccaccaatgactacaactaaaacaacaactacaatccaaaaccatgctcttttgtagaatggtttttgctctacataaacttttccatcttcgccggttatcttcttactcatattttcctccctgtgagtatataaaaatcagcttttagagtcttcagtatctttggacaatgaacctatagagtgaaacttaaggtgctaaactaatcttcagcagcttctttttcctttgataccggataaggatgttttttgtagccttgtttaccccaaggacaaccaatagagtaggcgatcattaatccaattccaaagccacctgcattactgatgccacttgcaaaagcaaaaagaacgttcaatccaattattataaagaaaataatcttaacaattcgttccgcttttttgtttggtggagtttttaatgtaacaaaataccagattgctaatcctacaccccaagcagagaaccaatacaagaagccttgatagtctcttacaattccaaacatagcaacgctactaacagattgagcttctacaaatccaaagaaagctccaagtgccaagaaaatagcacctactaatcttctaacattcaaagtgttttctttattcacttttaaacctccatgatttgccttaagtttaatgtcattggcattgtggacaataaaatattttgggataaaaagaggcatgcaatatatttcgagaagaaatactcgcatgcctcgctcatcaatctgagcaaaaacctaaagaccactttcatggtagacattccgctgtctatataataattattacacacgaatatttttattctagtattaaacaatcatgcaattaattctttaacaacgctatcgcgtttagtaaatggaactgatttaatatctttttctgaaaatagttcttcaatttcaggtttaatttgtacttccttatcgtttgaagaaatatcatttagaaatacataaaatgtggaattttcacgtatttctcttgtttgaagaatgtcagttagcgccgcttttgcgaataatgagttatttggattagatagagtttttataaaacgtgtaggaatatctttatagccagaaattaagtaatcaaaattaaatgtgataccacttgtaccgggaatagagatatcttctgtagcacgaatatgattttcttccagaaatgatcctacatcctcaaaaaatagggactttgtagtattttttgaaagcatgaacatatcattaactgctagaatagcttgtaataatctgttctttgcagttggaaaatatttatattctacagtagtagttaattctccatctttttcagtaataccaaacgcattaagtctattagtaaaaatcctttttctatttttagatcttgaaatagttactccattactctttaagttatctagcgtccagccatcatcagtaagagtaatactattgtttttattcttgatagcatacataactatttcatcagaaaatgagtctaagaaaggaacttcaattctaataacgttttgtgaaagatctttaaactttgcttcttttttataccagttaacgtagtcagttaagagcttgtcggctagtgtcatttttatcagtccttatatgaacgaactgtaaaaacttttcaatggcattttcaagttcgtcatttgaattaaaaatataatcatctaaaggatatgcatatgaaacaatgctgttattgacatatctatataaatgaatgtgatttccttctacaattgtaccatcatagttgtgatgtctagttccgtttatgcacagtctaactaaatgtgcattattttgtttaaagcgaatatggagagagtacttagtatctagacgtcctttatatccgtgccaaacatactttaaattgctactttctcctaatacaatgtgatcctcattgaatttaccaagtggaacgttaagagtaaaactttcaaaaaaatgtttagcttcatctatcagttcatctacttcattatcgcttagcttttctaaatccattaattaattctctctatccttttattatttacaacttactagtaaattgaattgctttatctatgattttctttgaatactcaagcttgttcctcaagtaagtagtagcaatctctagggatgccgaaagcttgagcaaaggtgtacatattatagaagtaaatatcgtgtaagtcgcaatattcagttaaaagatacaagctgaactcatttgcttctcgttctaggcgaatactgtttaccgaactagaatggtattcgcttttttcgtgtcctagaaatagatggcctaactcatgaccaataataaaaggaatttcatctatatttttccagttagcattaattacagcggtgcgatactcaggaaaggcctcagatggatcatcgttttcagcagcgtaagagaaggtgactccatattggtgatctaaagcgtaattcattaaccacctaattacttgatttctagctgctgttttctgttcaggtgtttggtacatgggctattggtccttttttggaagattatgtttttctgcgtactgttgggcaagtaagcggaaagtatcgtttaaatcctccgagataactcctttgtagggcagaccaagatcttcgtaaccaagttctttttttgaagaaggcatagataggtcaagcaacgaatcagaagaaatgttaaaagctttagctaatgcttttaattcatcactagataccttacgagtgcctcgctctattttgtttaaggcagtacgttctatgcctgttttttctgatagttctatttgtgacatattacgatcttcacgtaaattaatgatcttttttgcaagagttattctatcatctatcattttatccaccttgtttattgcgcttttcgcaataaatataacactttttgtgcttttttagtactttttttctaaaatagcacaaaaaaatgttgacagtgcgaaaatcgcaatgtattataataaatgtaaattgaattgcgaaaatcgcaagttaaacagaggtgagaaaatgactaaagcaataaatcttcctttgattaaagctaccagattaagactggggtatacaaatgaagaaatggcgtctgccttgggattaagtggtgcagataagtattatcgtagagaacaaggggaatacaattttaaagcgactgaattaccagccttatcacacgttttacatattccgcttgaaaaaatttttacttaaatttgtgcgattatagcacaatagagggagaagaattatgaaagatttaattcaaataaaagtagaaaacgatcagcaactagtaagtgcacgagatttacataaagctttagggtttaaaaagaaattcagtggatggtgggagcaaaaccaagatcagtttgaaaaaggtattgatttcaacgaggtaccaaaaggttacatcgttgaaagtggcaatggaacaacgagagcatatgacgattattggttaacagttgataccgctaaagaactttgcatgatgtctagaactgaaaaaggtaagacaatcagaaaatatttcattcaagtcgaaaagaattggaactcaccagaaatggtaatgaacagagcgttgcaaatctcgaaggctagggtcgaaaagctggaagcagataataaaagcctttctttacaacttgaagaaagcaataagaaggctagctatttagacatcatcttaggaacaccagatgcattagcgattacgcagattgccgctgattatggttatggtgcagtaaacttcaacaaacttctaaaacaagttggtattcagcataaagttaatggccaatggattctttacaaggtctatatgggtaaaggctatgtagtaagtcaagctttcacttttaaagatcatttaggtaaagacagaagcaagacaactacttattggactcagaaggggagaaagcttatctacgatgtgcttaaagataacgatactctgccgttaattgaacgtgacgatattgcataggggacgtaatcatgaaaatgaaaaaggatgatctaactattaaagcctttatttataccgaaaggaaccacaatatgtcgtggcaaagagtggaagaggtattacaaattaaaaatataagtttaaagagtctatctatcaaatccggtcttaactatgaaaaccttaggaattatcgatataagcactatgaacctactttcaagacaatgtgtaagattgctgacgctttgggagttagtcttgatgaattgagaggagataaggatgaagttaacactagaaggtaaatcggaagaaattcaagatattctaagttttatccatcttcagcaagaaacttatcttgctgtaaagggagtagatagagctagtaaggaaagtactttgattcattaaaaaggagatgatttcatgcaaatcgcaatcccagaacgagttattgaaagagctattcaacagaagtattttaacgtgacggcatcagcaaacttcttaggagttagtccatctacatttagaatttggctgaaaaagtttgattttaagccaattagtattgatggccaaatcttatatgacaaggatgtcttacaaaaatttatggaggatcacaaactatgagtaaatggattaaccacaagatcaacgaattcatggggactgatttcacagtacgtgaaacagaaatacttgcgctaggtaccatgtgtacagcattagtagcacttatttttacgatgtatacagccatttttcctaatatttaagtaaggtgatgaaaaaatatgattaaaaacaaaaaatacagggatccatttaaaggtatgagctttaatggaaaccctgtatcaaaaaaaagaatatattgcagcttatgaaaactacgttaaacgttgttctggcgaagccaaagattagttctaaaggaggtgagaaagatgacattagaagcaagattaatcagcaatagcaacgcattttttgcaagacaagataagtcaccgctagtagctgacgaatacgaaaagcaattcaaaattgcgttaatgcaacaaaaaaagtcgttactgactggcatcagtaacgactaattcaaaggtttaaaaatttaatttatctataaggagtataccacatgaaagagtttgatcctagagatctctggaaactacaagaagttaacggaatggttttaagagatatacatggcattgatgtagctattggaaaaggctttgaatacaagaatattaaagctttcattgaagtttatacaactgaatatggtgttaaagatttcatggaaaaaatgggctttgaaaatagtgaagactttactaaatattattttaaagagtttcccgatgaatgtgattggtacgatgcttgttattgggcatttaacgggatatatgctgacgatttagcactaaaaggatacgaggaagaagcctatttagatgcagaagatgcaaaaagagaccgcttagcaggtaaataaaggagactactatgagaactactgtcacaaaagaattaattaaatttgataatgaagaattaccgatcaatttagaacctgcaaaaatttattttccaaaatatgaagaactaaagaagcgagttgataggctgaccgatagtttaaaggactatgtagttacagaagactcatacgaacaagataaaaaagtaagagctgaattaaatcgcattcagaaaatgctaagtaaaaaaagaatagaaatttttaatgaagctgtcgagcctgctaatgaatttaaacaacatgtatctggcttggaaaagcaaataaagtgtgcatcggaccgaataagtgaaggaattaaacattataccgataaagaaaaagatgcaaaatttcaagaaacaaagcttcgactaggaaagcttgctcttaaatataatgtttcaattcgactattaggagatattcgagaaaaagataatcaattcaatcattggcttaataagtcttgttcttggaaaagaattgaaactgaagctgagaatttctttaaatcagaagctgagaaagcaactgctaaagcagatgcacagaaagtaattatcaataaagctaacaatccattatttaaatcagcactaccgatttctccttatttagagatgttggattacaaatctctaccagacgtcttaaatcaaatggacaatgatttagagagtgtaaagaaacaaaaaaagcaacagaaaaaagctatgcaagacataaaaaaacatggtgaccagtatatagacactaatactggcgaggtagttgatacagttcatagtatgaccattaaattttcgggcactatagaacaatttaaagcattacttcagtatgccgaaagtaacaacattagctatgagagggtgaaataacgatggaattacttaatcagccgacaccaccaatctctagtcctcaggccgtcggattaatgaatatccaaactatagtaggtatggatgctaaacaatctctagatgccaaattatccttattaaatgactttgtagagatgaaaagggtacttgcccagccttctaaaagcaaagatggctatggctataaatatgctgatttgaacgatgtcttgtcagtcattcaacaagcaatcggagatttagatttatccttcattcagcaaccaattaacaaaacagctaaaacaggggtggaaaactatgtatttaatagcaaaggagcaatccttgattttggaagttacatgctagatattacgaagcctcaagcacaacaatatggctcagcactaacctattgtcgtcggtattccattagtagcatttttggaattgcatctgaagaagatactgatgctaaagctttgccccaatatatgagtcctgaagaaattgatcgattaacacttccttacaagggaaaacaagtttcattagctaagttgttttctctagggttagctggtgattcaaaagctaaagctaagttacttgatcgagaaaataataatgttaccaagttagcagttaaaagtatgactgatatgtgggatttctcaaaagatatagaggccatgaagattaatgaacagactgaaattaaagctagcaaagatcaagaagaaaaagcgaagcaagctgctttgaataaggttcaaaaaggtaagaaagatccgtttgaggataagaaagtagaatctgattctgatcctgaagtagacaaattgttttaggtgatagtaatggtaaaaatcaaaaaggtatacgacaaacattacactgtcataaataactcggttctcaatgatgtatcgcttaagtgtgaggataaggggctgttcacatatctatggtctcaagccgatgagtgggatttttatgcaaaagaagtagcaaagcatagtgctgatagcgaagataagatctataaaatacttcgaaaactagaagaacatggctatctactaagagagcgacaaagaaatagtaaagggcagcttaaagctaataagtggtatttatctgaaactcctaaacagaaatggataaatatttttaaaaaacgttccactacaaataaaaagcctattcggcaaaatccaaaacaggtaaaaccagatctggaaaaacctaatatggaaaaaacggatctaacaagtactaactgtaacaaatacttatctaaacaagtaaagaacttaaataaatctctctctaagggagagagggagagagataagggaatagtaaaaatgttactaaattatctcgacatctttgctgagcagtggcacagcaagccaattatattttcgaaatcagaggtacagaagctaataaaagcagtgcatgggaaagatacccaaaaacttaaagaagcagccgaaaagaccgttgtttacggtgaacagtatccacaaggttacctgcttacttgcatcaagaacttaccggaggaagtagtaaatgaaaaatagacttaaagagttagattggagttctaagataatgaaacaaaataataaaaaagataatccctgtaaattttgtaatatcaacgacgataactatggtaaggacttttccgaagacgaatatgctgaatttaaattgtatagagtgaaggatgattattacatctataattattcagcttatagcgatcctacttctgactggtttgaaacatattctggaaagattaattattgtcctaaatgcggaaggaagttagctgaaaatgaaaattaaatcaattattgaaacaactaaatgtatgtatgcagtatcaaatgatgtagatactatttcagtttctgcagggatggaaaagtacagacaaagaatttataaaggcacaacttccaaacatttttggagaggacgatgaagatgaataacgaattacagctattcgactttgaaaacaatcaaattagagttttaaaaatcaacaatgagccatggtttgttggaaaagatttagcaaatgttcttggatattctaatactcaaaaagcgattagagatcacattgatccagacgatttaaggggtgaacgaatcgttaccccctctggaaaacaaatgacaattattactaatgaatctggaatgtacagtttaattctttctagtaaattgccaagcgcaaagaagtttaagcgttgggtaacaagcgaagtgcttccagcaattcgagaagatggagcatatattactgacaataaggctatgcaattgatgagcgatcctcaggagcttggcaatttcttgttaactattggcaatagagttaaggcattagaagctgagaaaaaagagcttaaagacaccaatgcaaaacaagcagcaaagattgctagagatgctgatgatgtggtttttgctaaggctattaggtatagccatcatgcaattcctgttggcgaattagctgaaattttaactcaaaacggttttgtgattggaagaaatcaactattccaattacttagagaagaaaaatatctttcaagttttaatcatagctggaacgtgcctatgacacagatggttaaaagagggctatttagaattactcataatttgaccagagatggcagaggatattctcaaacatgggtaacgcctaaaggtcagaaacacattattaacaaagcgttaagaggaagatttgatgatacttatcaaaaagttatggtatcaactttgaacgtttagtgaggttagaaaaatgagcgaaattgaaaacgtaaaaaacggattaacttatcttttagatattaatgatttagcaactagtgtgacagtaacagagggtggcgaatcgcatacgatgaatttaaaagatttaaaagtgacaaataccgatgttcttttacaaattgctgatttattaggtattgatatcaacaattaggaggagactagaaacgaattagaggtaggcaacgaaacaatggtcatgatgtacttaaatattttgaaatatgctaagcatcattgttctgacaacgaagatccttatgaaattactgaccgagtatttactgatgcgttagtagcaaataataaaaacaattagaagacgagagggagtgtaagtgtggttcagatgaatttagggctaatgcctgataaaaaattgactgctaagaacgtaaaaagatttttggtggttgattttcagcaatatttagacttagcgggtatgcatcgtaatcaacttaccagtcctcacctgtcattagctcctggttctactaataaaaataatattgaaaataattttattgaggatacgcaaagagacatggatattgcagatccagcaagaattgtttgtgcggctgtgtatagaactatggaggattgtactgacaccgaagataagccatacaaaagaatattaattgatacatatattaaaaaattgcgaatttttgaagttgcagctaacacttcattatctactagctctgtcgataaaaagaaaattgatgcacaggttcagtttgctaatcgttggttacattgggcagatttttatggattagaagattatcctgattttagagttatgaaaaaagtgggataaattaaaattgttacgttttttgtatgttttatttatgttcttgggaggttgtttagatgttaaattgttatcgtcgaaagattaggtggtaagatctttcgacaacacctcgacgatgctatgagtgcggtttttcgaacttaagaaatactccttttagaattaatagaagatcttgattgtgtaagtacaattgactgaccgtccttggtaggcgatagcagtcgtccgattcgactggcggttatagcctgttttcgcaggctaggtgtccctaacaaaagtatttttcatttttcttaatcctaaaaattactttttttattgagtaatctggttcgcccccagattgctcattagcctaggcaggtagtcattagtgactattatatataatagttttttcgcctaggcacaacatctccatgccatgaccctcaacggtttcgaggcgagcgtagagttaagagctggttatctgttcgcagtggaccgcaacagatgccgtgggtagaacggaacacaatttggaatgaaagaaggcgatcttctttcacgtatctagcaaggttcgactccttgcctgctcattgtccggcggaaaacggacgtaaaaatataaaaaatatacctggtaaatacagtatatttgatgttttattcgtaatagtaatatatatatacacgaaaactatattacttgtcgtttagtttacagcgtctggtttagctctgtaccttaacagagcattacaggagtgtagccaaatggtacggcatcgtgtttgagcccgagttatgttggttcgagtccagccactcctattgattagctttgtttgattatctttaatctctgttcgtttcatcaaagctaatctattggctcgttggtcaaatggtcaagacgccaccctttcacggtggagttacaagttcaattcttgtacgagctatgggaactaattgaattaattcaccgcattaagaaattcctctatattatgtatttaacacttgaggctattgctctgtgttcgctgtgcggacatgcatcccttataaggatgtccttaataaaaagaacatagtttggcaaagtggtccagtagcaacgacagcggactgtaaatccgccaccgaaaggttacgtaggtgcgagtcctacctttgccataaggacacacagcgtacgaacaatgtgtgtcctttaatttacagcatctggtttagctctgtacctaacagagcatcatggcaacttagctcagtaggtagagcgttagagtgaagttctaagtcgtcggtggttcgatcccatcagttaccataagctaagaaattatcttggctattcctaatattattcatgaagaagggtgtaaccttctttttttattgataaaattattgtgaataatattaggaggattcgtatggaaaataaagatgctataaaactagttaaatttaaagatttaaatttagaggatccttttttcgattcattgagagatgattatgaaggatttaatgattggtttgaaagaaaagcactttctgatagtgacgcttatgtgttatttaaatctgatggtatgcttcaagcttttttatatttgaagcaagaaagagatgaagatacgactatctctccaagtcttcctcagtgtaataaattaaaagttggtactttcaaggtagaagcacataaaacttctttaggtcaaagatttatgaacattattgttcaagctttaattcggtatcattttgatttaacgtatgtgactttttatccgaagcaagttcaattaaagactttgtttaaaaaatatggatttgaaaaatggggaatgaaaaataatgaagaggtttattataaggatttaaaagttaaaaatagtacatttaaagatttcccccgtattaatgaaaaaaggctagtcaataaatttttactgggaatttatccaaaatatcatactgaattatttcctgattctaaattatgcaatgaaaaagattttgttagaaaagatatttcgttttcaaactctattattaagtgctatttaggtggtatggaggaaatgagtaactttaagcctaatgatctcattgcaatatataggacaaaggataattgggctaatagtgcattctataattcagttataacatcagtttgtacagttatagatacacgtaatattaatgactttaccgatttttcgtctttcaaaagatatgtaggaaaagaaacaatattttcagaacaagaacttaaacgtttctatgaaaccaaaagatatccttatatagtaaaaatgctttataattttcctttaaataagcgtattactaatggtgaattaagaactaaattaaatattgttcttgactattggggatgtgctgaattaaacaacaatcaatttaatgcgattttaaagtatggtgaaataaatgaagattttattatcaattaagcctaagtatgtaagtagtatcatgaatggcacaaaaaaatttgaatttaggcgaaagatctttaaaagaaaagatgtagatactgtagttgtgtatgcaaccaagcctataggaaaggttgtgggagaatttgaaataaagcaagtaatttcagatactcctaagagcgtatggaatatgacagcacaatatgctggtcttgataaattagatttttataattattttgaaggattagatgaagcatttgccattcaaatttctaaagttacgccttataaaaaacaactagatttgagtgaactagaagatggaaatttaaaagctcctcagtcatttatatatttaaatggataaatatattattagcatctagtattgaaggtgattaatataaacaatattaattggacaatagtagctagcatagctgcagctgtatcagcatttgcatctttaattagcattattataagttaccattggaatagaaaaacatataaggcaaatgttgaaattgagccaaaattagaagcattatatactttaagaaaattaattccagattatattgctgaaataaattatgttacttatttatactgtaaggctgcagctaatcaaaatgatgaaagacgagctaaggagaatatacttccagacggtgtaatttggggtaatattacttttgaagatcacgatagacaaatggcaaaaaccaagctcgttcacgaacatttaacagctattcttagattagaaggggctgcattactgttaaaggatgctcaagagctttggaattgtctaagtttaaggaaagaatattataaagaagctacaaatgaattcgtatctaaaaaagaaaaagaattcaatcatttgttaaatgaaacaagtaataaattaaataatgattttatagaatattataaaagtaaaattgaactttatgaaaaaggaaagtcagcataagctggctttttattttacattaaattgaaaaaaggtggtgtggtgatatgtcatgagcaaaatagaagatgcaaaagcagattacttagcaggaatgaagtacaaagatattgctaagaaatatgaagttgcattaagtactgttaagtcatggaagactagaaataagtggcaacgtaataatgcaaccaaaaggaaaagtatgcatacaaaacaaaaaagtacgcgtacaaaacgagaaaaggttgcaccatcattaccatcaccagaattaccaaataatgatgaacttactgataagcaaagagccttttgcctgtactatttgcaacgatataatgcgacctgggcttatcaaaaagcttatggcggaaactatgaaactgcattgcgagcaggaccaagattgttgggaaatgttggagttaaaaattacttagctgagctaaagaaacaacaatcgcaagatctatatgcgaccgcaaatgacatattgctgcgctatttaaagcaggcgactagtgatgttaccgatgttctgtcttttaaaacgaaaaagcgcttggtttattacaaaattcatgataaagatggtccatacgaggatgctggaggtaagttcaggtatgagcctaagattgatccagagacaggtgaacaagcgtattactatgaacatttaattactctgaaagatagtgaagatattgatacgtcaaatattaagagtattcgaatagataagggtgagcctgtagttgaaatggaagataggcaaaaggcgatgcagattttacttgatcgcttgcctgaaccagaagttagtgatgacagtactacttccttgttacgtgctcttaaaaatggtatggataagatttggagtaaagataatgaagataactagatttaactttgttccgttttctcgtaagcaactgcaagtcttaagctggtggagtaatcctcaaattctaaaccaggaagctattatttgtgatggttcagttcgtgctggaaagactgtagtaatggcgctctcatatatattgtggtccatgactaatttttcagggcaacaatttggaatggcgggaaagacgatcggatcttttagacgcaatgtacttcgcccattaagaagtatgttagaaagcgaagggtataacgtatatgattctcgctctgagaatatgataactatcagcaaaaatgggcatacaaacttttacttcatctttggtggtaaagatgaagcatcacaggacctggttcaaggtattactttggctgggttcttttttgatgaagttgcccttatgccgcaatcatttgttaatcaagcaacagctcgttgttcagtgacaggctctaaaatgtggttcaactgtaatccgtctggcccgtttcattggtttaaactaaattggattgaccagatgaaagataagcgtgctttacgcatccacttcacgatgcatgataatccatcccttgacagtgtaactattaacagatacgagcgtatgtattcaggagtgttttatcagagatatatacaaggtctatgggtaatgtcggaaggagttatctatgataattttgataaagacacaatggtagttaatgaattacccaatcattttgaaaagtattatgtatcttgtgactacggtacattaaaccctactgcgttcctattatggggacgcaatcatggagtttggtacttggttaaggaatattactactcaggaagaactacatcccgtcaaaagacagatgaagagtattgccatgatctcaaagagtttcttggagatattcgagcagagatgattatcgatccatctgctgcttcatttagtacaactttaagacagaatggttttaaagttcgaaaggctaaaaacgatgtattagatggcattagagttactcaaactgcaatgaatgaaggaaaaataaagtttagcatgaactgtcctaatctgtttaaggaattagctagttatgtttgggatgataaagcagcagaacatggtgaagataaacctgttaaacagcatgaccatgcttgtgatgcaatgagatatttcgtatacacaattatttacaagaaagttactgcaaaagttactgtacgacctagagtacgtggcttatagaaggaaggtgtaaatgtggcagttgtaattgataaagatttacttgacgatgtgaatgaacccaatattgaagcaattaactatgcgattagagaattgcaaaatcgcaaaaaaaggttagacaaactgtctgattattataatggtaagcaagaaattgaaaagcatgagtttgataatgctaccgttgaagcagctaatgtgatggttaatcatgctaaatacattactgatatgaacgtgggctttatgactggtaaccccgtgaaatatgttgctgaaaaggggaagaatattgatgatattctagaagtttttaatcaaattgatatccataaacacgatattgaactagagaaagatctgtcggtatttgggtatggatatgagttgctttaccttaaaaaaactgatccaatatctgttagagatgaactagggaacgagaaacttactccaaatactgaattaaaaattgaagtaattgacccacgggcaactgttgtggtttgtgatgatacagttgagcatgatcctttatttgctgtatttacacaagaaaagaaggacttagagggtaatactaatggttatagcattactgtttacatgcctcagcgaattgttgaatatcgcacaaaaacaactatggaagtttcagcaaatgatccaattgtttatgatggagagaatttatttggtgcagttccaataattgaattcagaaacaacgaagaaagacagggagattttgaacagcttatctctttgattgatgcttacaacctactacaaacagaccgaatttctgacaaagaagcgtttgttgatgcattgctggttacattcggatttggcctaggggatgacaaggatgatattcaacgattaaaacgtggcgcaatcgaagctcctcctcgtgaagagggagcggatatcgaatggttaaccaagagttttgacgaaactcaagtcaacttacttagtcaatctattgaaaatgacatccacaagatttcatatgtgccaaatatgaatgatgagaagttcatgggcaatgtttctggtgaagcaatgaaatttaagttgtttggtttagaaaacttgttatcaattaaacagcgatacttttttgatggcttacgtcgaagattgaaactaatccaaactattgtaaacatcaagggtgctaatgatgatgctagtggatgtaagatctcacttgtagctaatattccttctaatttatctgatgtagttaataacgttaaaaatgcggatggaataattcctagaaaatatacttatagttggcttcctgatgttgataatcctcaagatgtcattgatgaaatgaatcaacaagatgctgaaacaattaaaaagaatcaagaagcattacgtgggcaagatccagatcgtttagaattggaggataagcaagatgattcgagtgagaatgataaagaagccggatcaaaccataatcagagccaccggacacgcgcagtatagtgttaaaggatctgatattgtttgtgcttcattttctacgcttattactcatactgtaaataattgtacgaaagtaactgcaactgataaggatggcgtattaattgctacattttcagatcctaaaagtattgaaaataagacgctattaaatgcatttgaaaatacagttaaccaattaattgaccaatacgggcaatacatttgttggtgttgatggtctatgaaagttaataagaagaaatttacgtattggcagttacgtgatttgcaagatgagcagagaaatcaagatgaagcaaccgaaaggttaaaaataattaataatgcatatcaaaaagcacaatcatatttaagcgacgaggttcaaaaaatctatcgtcgctatttttatgcagatatttcaaaagatgaagttgcaactatcatgtcatcgcacatttcgccttctgaattggttactcttaaagctttatcgtctagtatcacggacaaggaaagtaggcaagcagttgataattacttaagtagacttgcagctaagagtagaattacacgacttgaagaaatgcaacttaaagcatacattgctgcaaagtcagctggtgcaactgaattagatcaaaatgttaaattgcatactgacataatgaaacgtgcttggtcagaggcagaaaaacaaagtgctgtttatgacaccactaaggattacacattacactctcctcactctgtagaagttaaacaggataaaatagtcattaaaaatcctgatactggtaaagaagtggctactgttccgatggataaggatgttccaaagagtaaaatcactgaaatacctaatcgctatgttgaaaaatcattagaaactcgctggaaaggaaagaacttttcagcgcgtatctggggaaatactgataaattagctgaacgactgcaggaattgtttacggttaaagaactgagtaatctccctgaacgtgaaatgattaagcgaattgaacaagaatttaatgttggtaagttttatgccagtcgcttgattaggactgaagctaatttcttttattctaaaattaagctagataattggcgtaaacgtggagttaaacaataccaattgctagcagtcattgatagtcgtactagtaagatatgtagatcaataaatgggaatatttataatgttaaagatgcagtatttggtaagaatgttccaccattgcatcccttttgtcggactgttcctgtaatttatctgggtaatgctagaagtgctaataataaaccggtaaaaaagtaattcgtagacctaagcaagtcataaaactgcattgaaaactaaatatacgtatgtggatttgttactgcatatcttgaagtcaccgtgtagaaatatggggtggcttttttcatgcagttaatttgcaaatgttcatgggtagaaaggaataattatggaaaataaattttatgaaggtttattaaaacttgatttacaacgatttgctgatgaaggacaaggtgagggaggtgatgacagtaataatgcgcaagataatgtaaaagatgatagttcaacagatgaacagccttttaaaacatttagttctcaatcagaactggattcttttgtagataaaaaattagctaaggctttagatacggctcgctctaattgggaaaaagaacaaaacgataaggcacaaaaagccaaagatttaaaggaaatgtccccagaagaacgacaagaatatgatttaaagcaacgtgaaaaagctttaactgatcgtgaagccgaagtaactaagcgtgaaaataagagtaaattagccacacaattaattacagatggtttgccggcagaactagtggatgtttttgacgatgtgctagctgatgaggataagatgaccaatacttatcaaaaggttagtgatgtttttcgaaatgctgttcatgacgcagttgaaactcgactagctcaaagtgcaagacctccaaagagcttaggtgatactcaaactaaaaagtctactggagaaatgtttgctgaaagagctaatgaaactcaaaaggtaaaaaatgatttttggaattagaaaggaatagatatgtatacacaatttcaaaatggcaagcagctaaactttttagcttctgaaaagttcactgctttcccagaaacaattaataaagataattacaacgtccaaacagatgacttaggacgtaaatatgtaccagcgggaacggtatatccaactaatgatgcaaaagctgtcggaatcactgtaaatgatgtgtacgtgtcagaagatggatctaatcaaatggttgctgttatgcgtgatggttgggtgttaagtcaaagattgaatccaactccaacagcagaggctattaaggcaatgtcagcaattcactttaaagatttggatacaacgggagttgcatctgttagtaccctaaaggactaatagaagggagaatataattaatgaaaaatcaaaaactacaattagatttacaacgatttgcaacacctattcttgatatgtttagtcaaaatacggtgcttgactatacccgcaatcgtcaatatccagaaatgttaggtgatactttattcccagcggtcaaagtaccaacacttgaagttgatattttgaaagctggtagtcgtgtaccaacaatcgcaagtgtttcagcttttgatgctgaagctgaaattggcactcgtgaagcaagtaagatgactgctgaattggcatacgtgaagcgcaaaatgcaaattactgaagaaatgctaatcaaattgcaatcaccacgtaatactgcagaagaaaactacttaaaacagtatgtttttgatgatattgacgctatggttcaagcagttaaggcacgtggcgaaaaaatgactatggaaatgtttgctactggtaaaattactgataagaaaaatggcattgctattgattatggcgtgccaaagaaacatcaagagacattatcaggtaccaagacgtgggataagagtgatgcttctattattgataacttgcaagattggtcagattcactagatgttacaccaacccgagctttaacttctaagaaagttttacgtatattaatgcgtagtactgaaattaaagaagctatctttggtaaagatactggacgtgttgttggccaagctgatttagatcaatggatgacagcccaagggttaccaattattcgtgcttatgatggtaagtatcgagatgaagattcaaggggcaatttaacaactaactcttacttcccagaggatcgcatcgttcttttcaatgatgaagtacctggacaaaagatctatggtccaactccagaagaaaatcgcttaatttcaagcaatgctcaagtatctaatgttggcaatattatggccaagatttatgaaactagtgaagatccaattggaacatggattttagcgtccgcaaccatgcttccatcatttgctagtgcggatgatgttttccaagctaaggttctttaattaagggaggtgcttaatgtggatcaactaacggaaatagtttcagctttaagtactcgattagaaaatgttaataatgccttactaactgaactagttaaagaatcgatagcacaggtactagattacactggtcaaaagaaattagttggtagtatggatatttacgttaaaaaactagcagttattaattacaatcggttaggcattgaaggcgaaacacaacgttccgaaggcggtataactaactatcttgagactggcattccaaaagatattcgacaaggattaaatagttatcgaattgctaaggtgaaaaagctatgagattaaaagacagtgatcttataactgtttatcttagagaaccaatgaatactcaagatgatgaaggttatagtatttgtggctggggtgatccacaaccaattagaatgaatgttcaatcagctggtggtacggtcaatgctcaactttatgggaaagatatcaagtacatcaaaacatgtaagtatcaaggtgatttacttgcagagggacatggtgaaggttttggcgtttgtctaaaggtttccagttctagtgatcctgattacaagattacggctattcaggagttttctactcataaaaacgttactttagaacgtataaagagggatgaacaaaatgattgaagttgaacttaaaggagtcaatgaattaagagcaaagctaaagaaattaccggatataatggcaaaagcaacagctaatgctcaagaaaatgcaattgagcaggcggaagcctatgcagttgatgagttgcaatccagtattaaatactccaccggcgaacttactcgaagctttaaacatgaagtgaaggttgatggagatgaagttattggtcgttggtggaactcttctatggttgctgtatttcgtgaatttgggactgggttagttggtgaacggtcacataagcaacttcctaagaatgttgctattatttatagacagacgccatggttcttcccagttgattcagttgatcttgatctcacaaaaatatatggcattcctaagattaagatcaatggaaaatatttttatagaactactggacagccagcaaggcaatttatgactcctgctgctaataaaatggctaaggaagcaccagagattataaaaagatcaattgaccaagaacttcatgataaattgggtggttaaatggaaatctataatgttaaagcactagtgtttaagactttaaagtctatgccggaattaaaactagtttcaccatcttatccagataaatttacaacattcccagcagctatttattcaactagtcaatcttcttatatacgtaatgcacaacaagaagagacagacactgaatggaagataacaattgatttatataatgaccatggatcattaactaatataaaagcaaagctcattgctagattttcagcaatgggcttttctaatagtgttggtgaccaagatttaaatggagtatcacgtgtggtaatagttttcgcaggaattgtagataatactagccatcgtgtatatcagaaaggataaaaatgaacaacgtaaaattttatagtgatttattaacattagaccttcaacgttttgcagttgatagctcagaaggtcttgcaggaacaggaacaacactcgaaagatcagtagatggatcatcttgggatgaaattgctgatattaaaaccatccctgaattgggtggagacactgaaaaaatcgatgtaactactttggcagatgatagacgtaagcaaattgaaggtattcaaaatgcttctaacgttcaattccaagcagtatataagggtgctagttttgcaaaagctctggcgcaggctggtgatagaaagcaataccaatggaaagttacatatccagatggaatgacagctacgatgaaaggatcatacaacattaaatttggcgcagtatcagttaacggcgcattaggttacacaatcactattactgtatctgatggacctacatttgctgctgcaggagcagctcattaaattggtaagtaatagaaagtgataggcgtgggttcgattcctacgtctatttttatacaacatgaataggagaaattatggcaacaacaattaagaaagcaactaaaacagtacagctaggtgatcttgaacttaatttaaaactaggtggccgtgagatttttaaaattgaacgtcgtctaggtaaatcaatgctttcactttttatggattcacaaggcggaaataaattacctcctgtaaatgaaattcttatcgtattacaaggagctaatcaaaatcacggtgtaacagataaacgagttattgaagcctttgaaaagtatttagacgatggtcataccactatggatttgttcaatgaattaatggaattatttgatgaatctggttttttcggcaagaaaaagaagaaggctacaaagaccaatatggaatcggacgaagtaactctagatccagtggaagcagaaagcgaattgatgtagatgcaaatcatttcgagacagtatctgatctatttagacatctgtatccaatcgcagtggaatcaggtatagaggctgaccatttttgggatatggatttcggtgaaattatgacccaaatttcagcaaatgaaaaacgtcgattggaagatttacgagctaaagcttatatggatcatcgcctaagtgaaatgatggcttttgcttttaacgatccagcaaaaatgcccaaagttgaagaagcttatccatttgtgaaagataatttggatcaaacaaatgagaggtctgaggaagaacccaattggaaaaaagatcagattatttttatgcagcaagcccagaaaatcaaacaatttaataaagataaaggaggtggaaattaatggatctagaagaacttgagttaagatttagagcaaattatggggatgtcattcaaaagattgatgaattaactaatcttattgtgcaaaaaacaggtgatatgcaatataagatgcaaaataatttagataaatttcagcaatcaatgaatgagagtacttcaagagctaatgaaaatgttaaagaagagattcatcaacgtagtgaagcggaagaagctaaacaaaaattacttgagcagactcttaatactcaaaatgaggtaacagataagattgttcaaggaaataaagaacaagccgaaagctctaaagaagctgttaatcagtcagaaaagagcctggatagtttaacagctcgcttgcaagaagcttctaatatgcaacaacgaattgcacaacaaactagtacagctcatgatgtaataaaagatatttctagacccaaatcacaaacgcaagtaaaagaaccattaaagtccacttcacagaatgactactcaagctttgataactatcaagaaaaacgaattcagagttatatgccaaagcgtcctgttgatttaggtattgatgatgaaatacaagctgaagcatccagagctaaaaaagaagttgatagcttagtaactcacatcaacgagaagatggaacaggctcgatcaatgcaacggagaattgctactttaacagctaatcgagacaatctggatatgagcaagcagggtagtaaagttaaagcaatgagattagatgatcaaattgctgacgctcaaattaagatggaacggtatcagactcaagctaaggctcttgcacaggaaatgtcgcaggagcttgatactgttcctaactcattaagacgcattgagcgtgaaatggatcaaacggaaggcaagattgaacgaattagacgttctattgctgaaatgagggataatgatgcgactcttggccgatcctcgggcactaataaagagattaagaatgctgaagctgagtacagaagattagttgctagaagtaatgagttagcaaaggcatatacatacgtcagtgcacgtggagatgagttaagaaatagttcttcacgaattaatactgaattagctgaagaaaacagaaatgtctcaaatcttggttctaagtttagcaggctaaaaaatactatttctaatgttaattcatctcttagacgatttggtaatagtgggaattcttctatacggaaagctggatcaggcgtttcagttttaagtgaacgactaaggggcgttcgaatggcaattcgaatgttagccagtcaattaattgtgtttactctgctctatcaaggaattatgatgcttgcccaaggtatgggtgcagcattaatgactaatcgacaatttgcaagtagttttaacgcaattaaggttaacttgttgactgctttttatccaatttatagttatgttttacctgctataaatgcttttatgagttcattgcaaaaagcaactgcatggattgctcaatttacttctgcgttaacaggaatgagcttgtctagtgctagaagtggtgctcatggtttgtacgatcaagtacaggcaatgaatgatacttcaaaggctgcaagtaaagctaatgaagctgttaaaaaacaacagcaagaacaagctaaagcagttcaacgtgctaatcagcaaattgctcaagctaatcgtcaaggagcggcagccgttgcagcagaaaatgaaagaataaaagcatctaacgaacaagctaaaaaagcttttgaagatacaaagaaagctaatgaagaccttcaagcatcactcatgggctttgatgagctgaacgttttagataacagcaaaaacaataacgataatggtagttttgaagctcaaccactagaaaaatttactccacagcaaaagcaggatacacctatttttgatgatcccggaatagatgatggtgagacaggtggaaatcaggggcttgattggaatgttccattagttgcatcccaaaatgctattgatgctgctaataaagttaaaaaggttttaggcgaaatctttgatccaatgaaaaaagcttgggatgaaaaaggccaagctgttgttgatgcagctaagtattcatggactgaaattaggcgcttattaggggatgtaggtaattctttcttacatgtttgggacaatggaacaggacaaaaagtaatagaaaatctacttcaacttttagccgatatgctgaacgtcattggcgacatttcacgagcttttgcagaagcatgggaagagagtggtcgagggaccaagtttattcagactatcttcaattctctcaataatgttcttgaaactatccatcatatagctcaagcgtttcgtgatgcatggaatactggtgatctaggcaagagaatttttgctaatttgcttgatttagctactaagttagttgggtttgttggcgatattgctaaatcctttgatgaggcatggcaacatggtaatgccggaactagactatggcaagcttggctaaatgcactgaataatatacttgatacttacaagcatatagttacatcaattgatgaagcatggaaacactccaacttaggcgtttcaatttggagtcatattattcaaatagtaactggtgtgggaaacactattggcaatttagctggtcaatttgataaagcgtggcaacatggaaatgttggaacttctatctttaaaactttgctcggtatggtagatgacatgcttggatcacttggtgatatggcaacgtatactgcaaactgggctaagaagcttgattttaccccattgcttcagtcaattgataatctgctaaaagctattcgaccagtaaccaaagatgtttgggatggattatcgtgggcatacaagaatgtcttgcttccactcgcacgttttacaattactaaggtaatccctgagttcttaaatgccttagctgctgctcttaaagtcgtacatagtgtaatcaaagcggcagaacccgttctagaatggttcttcgatagttttattaaaccattggctaaaatagctggttttgcaattgtagaggctttaaaacttctaactaaagcacttgagggcttatctgattggatagatcatcatcaaacggccgttaagatcatgactgcaacgttgcttacgcttttaggtattaaggttgctaaagctactattgctggaattcaaagctttactgatactctgaagatccttgcaatgctcaaatttgataaattgaaagctgctgcaaagtatgctgatgatttattaggagtagcaattgaatttgcaaagcacccaataactaatattaaagaacttgcaaaattaagttttgaaaatatcaagggtggctataaccgcatcaaagatctttggggtgaagtaaataaaggctggcaggatagtaatcttgccaagaccgattttcttaaatctgctcgctcttcaatacaatctggcgaaccaatgaagctggggcaaaaacttggtactggcttatctggtgctatgattgctgtaacttcaggaattgatatctacaaaggaatcaaagctaataacaaagaagaaaaatttgcagattttggttctggaattggtggtgcagttggtggtgccattggactctggttcggtggcccactaggggcagccgtaggacaacagattggctcattaattggtaaatggggcggtgttggtgcctctaaatttggtgatggttggtctaagtatggtaaaggtaagaaacctaaagactgggttgaagccataggctttaaggcccatgaaatcttagataactttacttcttgggctaaatccgttggtagagatattaataacaatatttctaaaggtaaaaaagatgttcaaactgctagctctaatatccataaatggtccactaattttatttctggtgcaaagaaagatattaaatcttgggcacaaaatatcggttctaacattcataaagatgtagacaaaggtaagaaactagctaaacaagctggagataaagtaaaagaatggtctactagctttattagtgatgctaaaaagaaagttcatgattggtcttctcaaattggttctaatgtaaataatagcgttgaaaatggtcaagccatggctaagaatgctggaactaaaattaaaaattggactaccgactttagagaatcagccagtggactagtaagatcatgggccgaaagactaggagaacacattaataatggctctgaatcatctcgctctggagccactaatgccggtaataaaatttctcaatggacaagaagtttctttggaggagccaaccaaagtgtttctagttgggccagtggtctaggcggtcatgttaatgacggaataggtggagcttataactctgctaaaaatgctggtgaacgtctaggaagctgggtttcaagctttagacatgatacttcaagaaaacttggttcatgggctggcactcttgggagcacaattgggaatggaattactgatggactgcacaacattagtcgagccgttcgaaaagtggttaatgcaattgttaaaccggtgcaaaatgctactgatcaagttagaaaaggtattaactgggtacttggtaaacttggtggtgggtcaattggctggggattctttgattggaattcttatgcgaatgggacgaatagccacccaggtggactagccttggttaatgatcaagccggagacacttatcgggaaagttatgaattacctaacggagaacaaggtttattcccagctgaacgtaatttgttaacttacttgccagctggcacaaaagttaaaactgcaactgatacggctaatgaattagcaggtatggttcctaaatatgctggtggtataggtaactttaatttcgattttagtggtatctttagcggaattagtagcgctcttggaaacctaaattttgggaatatatttgatggggttggcaattttgttgatggtgtaatggaagaacttgaaaaagttactgatgatatagctcatccagaacgattagttaactacattattgataaatttgtcacctatgattggagtttaggcgacgcttcattaaagtttgctaaaggcgctgttcatcaagaaaagaaaggcatgatgaattgggctaagaaagttatcaatcaatttggtggtgcaactcatcaaacagggctgggtgcggaaggttggcgtagtgctgttaagaaagcattgcgcaagaatggtctacctgcaacaccagcatatgtaaatgcatgggttcgtcaaatccaaactgagtctggtggtaatgaacatgctgtacaaggcggttatacggatatcaacaccttaacaggagacttggcaaaaggattgttgcaaactatctctgcaacttttaacgcttataaattccctggtcacggtaatatctttaatggttacgacaacatgcttgcagcaattaactatgctaagcatcgctacggttcagacatgcttgctgttatcggtcacggacatggctatgaagacggtggcttaattgctaaacacggtttctatgagattagcgaaaacgacaagccagaaatggttgttcctttaactaatcgtgagttaggtatgcgaagaattaatgaagctattgcatttatgaatcagaattttggtggtggcttgcaaatgccatcttccttaagcagacgaactgctattgatagttcaatttattctgatactcaatctaatgactctacgtcagttcagcgtggaggattcaaagagatgagtacagaattagtaaatgctatagttcaagcaattcaaatgcaaaactttaatagtaataacggaaaacctattgatttacacttatctgtcaagattggtgatgagtcatttggcgaacacgctattaaaggtattaatactatcaatcaaaagaatggtagaaacatgttaaatctttagaaggaggaaatgagtgattgtattctttaaaaatttctgggacagtggttaatcctgccccgcaaactatgcaggtaacaattcaagatattgacgcaaaagcaacgcgtgatgcgcaaggattattgcaccgagatcgagtagctactaaaagaaaaattacattggcatttggtgcactcacggttccggaatgtgcaaagattttaggagcagttaaaagtgaattttttatagtagattacttagatccacaagatggaaatatgcggtcaggaacattctatgtgggagatcgaacaacacctgtttattcctttgtagattcggtccctgtttggaaaggcttatcctttgatttgatagaacagtaggaggtgagaaatattgctaacacaaacgaaagaagttagggatgcttggcgagcatcacaacgaacgttagatattaaagtggcagttaatgggaaaacttataccgctaccgatatcaacagtttgaaatatgattcaggagcttatactggtgacacgtttgccattggctcaacatactcaaatagtgttcaaattgaattttcacatttaatagagaatctaaaacttggtatggaagttttaccaagtatcgggattaagacgtctagtggctatgtatatgagccgttgggcgtttttattatctctagtgaaatcaagatggatcgcaataacaatcttacttccattagtgcaagtgatagattttgcgggttagaaggatcctataaatctaagctggcttatccagcaaaagttttagatgtaattgctgaaatctgtgaacaatcaggagtcaaggctaatgtggatgatctggctagacttccacatcaagctgacttacctagacctatcactggtcaaacatatagaaaggctttaggttggattgcacaactatatgccgggtatgctacgttcgatcgtaaaggtttatttacgattagaactatcgcagagcctaattatgagttagatcccagtcagtatgaacaagctggtttaactaaaaatgaagctccatatagaattagcggtattcagtgtcaaacgacaattaccactaaaactagggatggtgaagatactgatgaaactaagaattatcaagttggagatacgaatggatctcaaattaagcttgaaaacaatattatgacgcctgataggctgactaatatttgggagcagattaaagatgttaatttctatccatttagtttgaattggtttggaaatcctgcaattgaagcgggagattggttaaaactacaagacaagcaaggcaataagtttattgttcccaacaatagctacacacttgattttaatggaggactttcagcaacttctaaggcagatcaaacttcttccacagactctgtaatagcttgggagggaactttctctcaaactattagagaacttcaaggtcgtaaagcaccagatggaacagtgatttttccgcctagtgtaactgaaccacctacgaatgctaaacctaacgatgtttggttcaagcaaaatggtaattcaacagaattgtgggtgtttactgaacaagaagatgggactagaaaatggattaggagggatttaactcctgacgagattaagaaacaagttcaagaagcacaagatggcttgaaagatgctaagaaagaaatagcagataatcttgctaaagcggataaagatattgctgaacttaatgaaagtattaacaatcaaaaaggttcacttgatggtctaagtactacagtcaataccgttgttattcctaaagtaaccgatgtaactaaccaagtttctgatgctattaaaaaagtaaatgaacagaaaaatattgttactggactgcaaaatcaggctattcaacaaggaaaagatatctctaagattacttctgatgttcatggtgtaactgttgatctagctaatctcaatggggatgtaaaccagacaaaagccacagttcaaggccttcaatcaacgttaggcaatgcccaaggtgatattgcccagatcaaagtagatgcgaagaaattggaaactagtctatctggtaaagttgataattctacttatgcaacttttgttaatcaaactaatcaagcattaaatgctaagttgattgctagtgatctgaatggatatgctaaaactactgatttgcaagctacggctaatggattgcagtttaatatcaatagcgtaacggataaattgaataatctaagaattggaggtagaaatttagttggtgggactgacaaagaatacgtaatgggatttggaattcctaataccgtttggaaagataattttgcttatatctctttaccgttaattagtggtgatggaggcgaaattttaccccaaggtgcaggattttggcatgtattaagtccaggagaagaatatactcaaaccatttggatcgaaacagatgctatcataaaaagtttaaatggtacatttttaacatggctaactatggacgatgggcatgatgtgcaaaaagcatatattcaaaggataggcaataacagctataaaattgtaggttcttatacttggccacaaaataaaaaaggcaatagagttcgcttatttgatatttttagtttgccaaattcgattgacttgaaaagtggaacatatctaaagtttggaaaactaaagttagaagtgggaaatgcttcaactgactggactccggctgttgaagatactgaacacgatctagaaagtttgtctgcacgcataactattaatagtcaacaatttggttcttactatactaaaggtgagtctgacaatagaactaatactgcaaaaaatgaagttatcaattcaattaagaatgatagtaattggcatggattaaccaatatactaacgaatagtggctttatacaaaccgcagatggctttatacaaaaagtacagcaaacgatgcaaccaattattaatgaaaataatagtggtggagtgaatttattaactaatacatatactttgcgtaactttaataatgccggtaatgctggagaagctactggatttgaaattgattctggagatagccataaaaacgaattaaatgctggtgaaataagcacaaatgtttttcatgtttatgccaaagatttaaatcatgctcctgtttactttggtcaaaactttacactacccaaaggaacttggactctaagttttttagttcgtcataatggaagtagtgaacaaaaaatcagactaagcttttatacagacgattgtgctaacagaggatggattcctctaggaacatctgatgagatagataacatttggaaaagacatcagataacttttacaacaacccaggaaatttttgaacaaaatccgagagtacatatgccaactgatgatatagtccccggtggctctttgtattttgcaaattttaaattagaatccggatcaattgctactacttggtgtcctgctcccgaagatttagctaagcaagtagcagttactgaattaggtcaaaccataaaagggcttcaatcaactgtttcaagtaactacggaaatctacagagccagataagtcaaactgctggaactattaggaatgaaataactgatagaaccaataatctacaaagtcaaattactcaaaatgctaataatattagtattaaagtaaatgccgtgggggatttatctaacatatgtttaaatccaacatttattgatggaagtactgaaggttgggaaaacgtatttagttcgtctggagatcccggtagtcctacaaagttttacgggggagttaatacaagaaatgcgttttacggaaatatgttctcagtggcggcaggggataaatattttttctcggtctttgcttggcaaaatcaatctactaatcctttaaatataggatttacttatttgcaaaaagatggaacttggaattggcaatccgctataaattttgctcctaatgaaggtgcgcgaactaaatcaggatctatcactattcctaaggaagcagttaaagccagaatatgggtagaaattgattcattttctaattttggaaattggtggtttaccaatcttatagttagaaagaatgatactatctcgcaaattaatatgtcagctggcacaactttaatccagaatgacaaaatatatatggatgcaagctcaaccgtattttctggtaaagccttcattcctgatgcagcaataactaatatatcagctgataaaattaacactggtacactcgatgccggcagaattaatgtaattaacttaaatgcaaacaacatcactactgggacaattaagggacaaaatagtagttttaatttaactgatggaacgttaacggctttaaatcagtataatgagggcgtttttatgagaaatgggaaacttgagtttacctcacgtcaaagctggaataataactccacagctacatatggatatattcaatctttacccaaaatgtttgccttaggatataactatggtggattagatattaatggtactagtgggtttgtactgcataatgataaaacgaaaattaagactagtaatagtggacagagtggttcagcagttgaaggaggaagctatatttttggatctgatggtcttactagcataaataatgaaaattcagtgattattaatgcaggtgctcaatcatacagtgagtggacggctggaataagcttattatcagggaatgcatctagaaatgttcctccaagtatcactttaggatcctctaacagtctcaatgatcgctctacagttactatatctggaagtcttgcggtattaggatcgaagaatgccgctgttcgaacatctcaaggattaagagctattaacgcatatgaaacagccgaatattactttggagatataggaagggcaaagactaacagtaatggggctgtttgcatatacatggatccgttatttcttgaaacagtcaatacaggagttccatatcatatatttcttactagttatagtgaggcaagaatttgggtttcagagatgtatccatcatattttgtaattagatcagataagccaaatgctgactttgtttgggaaattaaagcaaagcgtaaaggatatgaaaatgatagattaaaaattatagatcaggagaaaaaagtaaatgaataacaataatgcagtatcacaaaaattaattaataaactagcggttagtgagtataacaatgcagttttagaagcaaaagttgatgagctaaatcaagaagtaaatcaattaaaggcagaaaaggagaataaagatgttaaaaacaagtaaatcaatcgcaatttcaggtcgttcaatggtagatgataagcaagtagcaacttttaacgctaatatttatgaagctaatgcttcaggtggtagtgacaacattaatatgattattactgatcgggatttatatgatgcaaacaaagttactgtacggaaggatttacaagactttcaaacaaaagtatggtcagcacaagatgaagtgatggcaggaagtgatgaaaaggcaagtgaaggttaatgaatgagatagcaaaactatgggaaaatataaaacaaaatcctctgcatttaattattgggctaatgatttttttatcaggaagctttttgttactttgtgatgatttctttctttggccgcctgaatggaccaatgtttttaataatgatctgattgacgctattgcgattgtgataggcgtcttttattttgcttacgttttagcaggtgctaatagtccactagctaacatttgtttattaacggctagtgctttccttttaacaattctcattgttttagaaattgggtgcgttttagcatttcaaaattatccattagtaatggcagcaatttatcagttcggtgcattgctattagttcaagtatgtgcatcaagatcaccaggcttaaaaagaaagtagggataagaggtgcaagaatggattgactttgtacaaaaaattgcatttcttatttctagcattgtaggacttttaacaattttcaatactcttaagcaaacagactattcaaatgctaaggaaaagaaggaagagctaaaggaagatgtagagctttatagaaaaagatggcttcaggcagaagaagcctacgataaacttttgaaagacaatgaaaggcttaaaagacaagttactagattagaaagtaggaaaaataatgaataatattttagttaatgtatccgctgtaattgttgcattggtattgtcatactttgtattttggtatcgaaatcataaaattgaaattgataaaaaaagagctaagggagatgctttagcttttgtggttgatactttgggtcaagttgctaccaatgtagtttacgatttaaaggataattcagaaaaaggtactgaaaagaaagaacaagctaaagttaaaattaagaatttttatgctgacgcacatttaccagcacctagtgatgcccaagtttctggtgcaattgaaaaggctgtagctataatgaagatgtcaagcgaaggtgaaaagaatgactaaagtagaaaaaagaagttatggagtagatatatccagctttcaggggactgatttattagctatgggcagatcaggtgctaagtttgctattgtaaagacttctgaaggactggactatagaaatccaaaagcccaagctcaaattaatagcgctagaaacaatggaatgatggttagtggatatcactatgcaagatttagcaataatgctaatgtagcagctcaagaaggaaactatgcagttagttcagctaaacaagttggcattgaaccaggtagttacctagcttgtgattatgagcaaggcagtggaaatgaaactggaggtaatcgtgaagaaaacacgactgcgattctagcatttctaaatacaatcgttagtgcaggatataagcctttattatattcaggtgcagaacttatgaaaaataaggttaataccgctaaaattttggcaaaatatcctaattgcttatgggttgccgcatatccttataaaggagcaacaaatactgctgatttcaattatttcccttctatggaaggcgtgatcatttggcagtttacagataattggcgtggtatgaatgttgatggaaacatcaacttattagaattagaaactaaaaaatctgtgtcacaaccagctaacgcacctggagaatctactagttggattgataattttggagataaatgggttaaagaggatggcacttttatcactgatcgaccaattaatttgagaaaaggagccaagctcactagtgacattatcactaccttaccagctggttcagtaattaaatatgatgcttatagtagacatggtggttatgtctggattagacagccccgtgaaaatggccaatacggttacttagtttgtcgtcaaggaaataccccgtggggaacatttaaataaagaaaaaagccactctggagaaattaattctctggagtggcttttttgcatacaacaaattttctattattttaactatgttttcttattacaattttacttacaaaatgttatacttaacttgcaacaagttagaaattctaaaattcaatgcactcaaaaagcattacctgatcgtcacaaaaggtaatgcttttttatcgcttagtgcaaccttctaagcgttgagggtggagtaaggcgactattaatgctttttgttgtgatgccgatcatccaaccagtgatcgaatagtgatttcactatttccacaagaatgggagctacaactaaagttagaaattccttcaatgaactcacctcctttcaagaggaggcaatagtcgctgaaataattatagcaaaatcaaagtcggaaaagtgattgaaaaaagcaagtaaattagctgaactttttaaagattttggttatgaagcttactggaaagaaaaacacgaacttgactttagagacgaggatctattagcagtaatcgatttaaaagacgttagtcaactaaaagagttagctcttgaaggtaaaatttacgtagactttgaaaatcaaataattgtacccactagctatgaagtagatgactaaaaatataagaggttgttttagaaaattaatttcctaggatgttttgtttgtggtaacaaatggtaacaattttggtaacatagcattgaatagttatatcaacataaagcaatgaagtttgatagatcaataattcaagtggctaatgtaaacataaataatcaagcactgaaacctgtcatcccgattgaatattattttgttaaaaagttcgtcttgggttagaaagacgaacttttttgtatataatgttcatgaaatatcaaaaagtttacatttactaattgtaagtgataagatatttgtctaaagattgtaatattgatcttaaaagaagtaaggcggtgcaaaatggaaaaatcatatagtgatagtgcaaaaaatgttcttgaaattgctaaagagcaagcacaaaactttcaccatcgaattattggaacagagcatgttctgcttgctttagtaattgaagctaatggggatgctggaaaacttttgcgtgaaagaaatgtaacactaaccttagtgcgagaagaaattgaaagatatactggctatggttcaagtccaaaggccacatatatggaaatgtccccacgtttaagtttagttttgaattttgctaaacaaagggctgacgaattagggactgctcaaattgagacaaaacatattttgctaggtttgttagctagtgatcaaattttagcaagtttaattttgaaaaatattggtgtagatccacgagatttaagtcaggatgtaaatgatagtttcatggatggttctggggaagaaaataatgttcttggtatttcttcagccactggtatgaaaaaaggtaagtcattgactccaaatttagataaagttagtgtgaatctaaataaaagagcccgtgaaggtgcaattgacccggtaattgggagagataaagaaataaaaagagtaattcaaatcttatctcgaagaaccaaaaacaatcccgttttggtaggagaacctggtgttggtaagactgcagttgcccaaggaatagcagccgcaattgtaaatcatgaagttccagatactctagctaaaaaacgagttatggccttggacatgggaagtttaattgctggaactaaatatcgtggtgaatttgaagatagaatgaagaagattctaaaagaaattcaacaggatggttcagttatcttatttgttgatgaaatgcatactttgattggtgcaggtggcgcggaaggtgcaattgatgcttcaaatatcttaaagccttcattagcacgtggcgatattcaaatgattggcgctactacttttgatgagtaccaaaaatatattgaaaaagatcaagctttagcaagacgttttcaacaagtaaaaattggtgaaccttcaaaagaagaaactgtggatattttaaaaggcttgcgccctaaatatgaaaaatttcacaatgtaaaaattgaagatgaggcaattaatgatgcagttgaattttcaacacggtatattgctaaccgattcttacctgataaagcaattgatttgattgatgaagcaagcgcagctgtaaaaattcaagcaatcggtaaaagtgatcctcgtctaactaaattggatacacaaattaatgatgttattcatcagaaagaacaagctgcagaaaatcaaaattttgttcaagcagctaagttacgggatgaggaaaataagcttacacaggatcgggataaattaatcgaaaaagtagagaataaaaactctaaaaagtcgattgttgattctgataagatcgctcaaattgtatctgaatggactggtgtgcccgttactagaatgaagaagagtgaaactaaacgtttagctcatttagaaagtattttgcatgaacgtgtaattggacaggacgaagctatcagtgccgtaagtcgagcaattagacgaagtagaagtggaatcaaggatgaaaatcgtccaatcggttcgttcttattcctaggacctactggtgttggtaagacagaattagctaaggctcttgctgcagcagtttttggctcagaacgaaatattattcgtgtagacatgtctgaatacatggatcagattgcaacaagcaaattaattggttcggcaccaggatatgtaggatatgaagagggtggtcagctctcagaacgtgtaagacgtaatccatattcagtaattttattggatgaagtagaaaaagctcatccggacgtgtttaatttattgcttcaagttttggatgaaggatttttaactgattctaaaggtagaaaagtcgattttagaaataccattattatcatgacttctaaccttgggtcacgtagtttgcaagaagataagacagttgggtttgcagcggataatgctgataaaaataaacttcaacaagaaaaagttacggcggctgttaaacaattcttcagaccagaatttttaaacagaattgatgagaccgtggtctttgatagcttaactaagaaacaattgcgtgaaattgttagcttaatgactggtcatttggtagatcgcttagctaaaaaagacgtaaccttaaagatttcaccagcggctttagatgtattggctaaagatggatttgatccagagatgggcgctcgtccattacgtcgtgcaattcaacatgaacttgaagatgtaattgctgaagatttaattagtgaaaaaattaaggctgaccaaattgtaaaagttggagctcatcaaggtaaattaaaatttacaattcttgataaagataacactttagtgaaaaattagttttttgacaaattagtaatataagtgtaaaatactaaacgtttaaaaggctgaaattcaggatttcgctgatctattgtccagcgagatgataaaacaaaaacgacatttacgttgtttttgtttttttgtacccaaattttgactttttgcaatttgtaacacaaatgtaatatttagattcttatataagaaaggatgttttctttgttaggacacgctgtgaactacggtagtcaccggacaagacgtagcttctctcgaattaaagaagtattgaagttacctaacttgactgatgtacaaacgcaatcttacaagtggtttcttaatgaaggtattcgtgaaatgtttgacgacattatgccgatttcagacttttcaggaaaactttctttagagtttgttgattacaagctcttgaagccaaaatacactcttgaagaagcacgtgatcacgatgctaattactctgctcctcttcatgtaactttgaagttaaccaaccatgagaccggagaaattaagactcaagacgtcttctttggagaattcccattaatgactgattcaggaactttcgttattaatggtgctgagagagttattgtttctcagcttgttagatctcctggtgtttactaccattcagattttgataaaaatggtcgccaaattttcggtgctacagttattcctaaccgtggtgcatggcttgaatatgaaactgatgctaaagatttagcttatgttcgtatcgatcgtactcgtaagcttcctttaactgttttaattcgtgctttaggatttggttctgatagtgaaattgcggatatgtttggtgaaagtgattcaattcgtttcactttagaaaaagatatccacaagaatcctgctgattctcgcgttgcagaagcattaaaggatatttacgaaagattacgtccaggtgaacctaagacaactgattcatctcgttcacttttatatgctagattctttgatccaagaagatatgatttagctccagttggtcgttataagatcaataagaaactttctttaaagaatcgtttactaagacaaactttggctgaaactttagctgatcctgatactggtgaaatcattgctaaaaagggtgacgttgttacccacgaacttcttgataaattatcaccttacttagatcgtgatgactttaagatggtaacttatgaaccttcaaaggaaggtgtgttacctgatccagtaacagttcaagaaattaaggtatattctaaagttgatcctgaacgtgtagttaagttaatgtctaacggccacattgcagatgatgttaaacatttaactcctgctgatgtattggcatcaattaactacttcttcgaccttcaagataatattggtactactgatgatattgaccacttaggtaaccgtcgtattcgtcgtgtaggtgaattacttcaaaaccaatttagaattggtttagcaagaatggaacgtgttgtacgtgaaagaatgtcaatccaagacatttctactgttacaccacaacaattaatcaatattcgtcctgttgttgcttcagttaaggaattctttggttcatcacaattatcacaatttatggatcaaaacaacccacttggtgagttaactcacaagcgtcgtatgtcagccttaggacctggtggtttgtctcgtgaccgtgctggatatgaagttcgtgacgtgcactatactcactatggtcgtctatgtcctattgaaactcctgaaggacctaacattggtttgattaactctttagcaacttacgctattgttaacaagtatggtttcattgaaacaccatatcgtcgtgtttcttgggatactcacaaggttactgataagatcgactacttaactgctgatgtagaagataattacattattgctggtgctaacgctcgcttaaatgaagatggttctttcaaagataagattgttttagcccgtcataaggaagataacctagaagttacccctgataagattgactacatggacgttattcctaagcaagtagtttcagtaacttctgcatgtattcctttccttgaaaacgacgactctaaccgtgctttgatgggggctaaccaccaacgtcaagctgttccattgattaatccacatgcaccaattgttggtactggtatggaataccgtgcagcacatgactctggggatgcattagttgctaaagctcctggtgtggttgaatatgttgatgcaaacgaaattagaattagaagagacgatgatactttagataagtatgttcttgaaaaattccgtcgttcaaacgcaactaagaactacaaccaaactccagctgttaagcaaggtgaacgagtagttgcagatgaagttattgctgatggtccagcaatggaaaacggcgaattagctctaggtcaaaacccaatcattgcattcttgacttggaacatgtacaactatgaagatgccgttatgatttctgaacgtatggttaaagatgatgtctacacttctatccatattgaagattatgaatcagaagctcgtgatactaagttaggacctgaagaaatcacacgtgaaattccaaatgttggtgaagatgcacttaaagaccttgatgaagaaggtattgttcgcataggtgctgaagttcaagatggtgatatcttagttggtaaagtaacccctaagggtgtgactgaattatcagctgaagaacgtttgcttcacgctatttttggtgaaaaagctcgtgaagttcgtgatacttccttgcgtgtacctcacggtggtggcggtattgttcaaaacgttcaagtattcactcgtgaagcaggcgacgaattgccacctggtgtaaataagatggttcgtgtttacatcgttcaaaaacgtaagattcaagtcggtgacaagatgtctggtcgtcacggaaacaagggtactattgccttagtttgtcctgaagaagatatgccatacttaccagatggtcgtccagtagatatttgtttgaacccaatgggtgtgccttcacgtatgaacattggacaggttcttgaattacacttgggtattgctgctaaacagcttggtattcacgttgctactccagtatttgatggtgcttctgaagatgatatgtggaatatggttcgtgaagctggtattggaaaagatggtaaaactgttctttacgatggacgtactggtgaaccgttccacaaccgtgtttcagtaggtattatgtactacttgaagttgactcacatggttgatgataagatccacgcacgttcaattgggccttactcacttgttactcaacaaccacttggtggtaaagcacaatttggtggtcagcgtttcggtgaaatggaagtttgggctcttgaagcttatggtgctgcttacacactacaagaaatcttaacttacaagtcagatgacgttgtaggtcgtgttaaggcttatgaagctattgttaagggcgaaagaattccaaaacctggtgttccagaatcattccgcgttcttgttaaagaactacaatctcttggtttagatatcaaggtgttggatatggatcataaagaaattgagttacgtgatatggatgatgactctaacgatcatttcaacatcgatactttatctaaacttgctgaacaacaagaaaagaagaagttagctgaagaagctgcaaaaaaggatgataagccagatgaacctgtagatgaaagtgattcttcaacttcatctgatgataaggtttctaagtaatataggaggttaaacttttgatcgacgtaaataagtttgaaagtatgcaaatcggtttggcttctccaaacaagatcagaagttggtcttatggtgaagttaaaaaaccagaaactatcaactatcgtactttgaaaccagaaaaagacggtttgttcgatgaaagaatcttcggaccaactaaggactggtcttgtgcttgtggtaagtacaagggtattcgttaccgtggcattgtttgtgatagatgtggtgttgaagttacttctgctaaagttagaagagaacgtatgggtcacattgaactagctgcaccggtttcacatatctggtatttcaaaggtatcccatctcgtatgggattagtcttagatatttcacctcgtgcattggaagaagtaatttattttgctgcttacattgttattgatgcaggtgatactgatcttgaagataaacaacttttaacagaagctgaatatcgtgaaaagaaagcaaaattcggtgaccgttttgaagctaaaatgggtgctgaagctgtaaaagaacttctagaacaagtagatattgataaagaagttcatgaactaaaagaagaattaaagactgctactggtcaaaagagaactcgggctatcagaagattagacatcttggatgcctttaaaaattcaggtaacaagccttcatggatggttatggattgtattcctgttattccaccagacttgagaccaatggttcaacttgatggtggacgtttcgcaacttctgacttgaatgatttatacagacgtgtaatcaaccgtaacaatcgtttaaagagattgttagacttaaatgcaccaagaattatcgttcaaaacgaaaagcgtatgcttcaagaagcagttgacgcattaattgacaatggtagacgtggacgtccagttgtcggaccaggtaatcgtcctcttaaatctctttctcacatgttgaaaggtaagcaaggacgtttacgtcaaaacttacttggtaaacgtgttgactactcaggtcgttcagttatcgatgtttcacctgaattgaagttttaccaatgtggtgtaccacgtccaatggctctagaattatttaagccatttgtaatgcacgaattagtaaaacgtggtttagcatctaacattaagaatgctaagcgtaagattgatcgtgaagatgatgatatctgggatatcttagaagatgtaattaaagaaagaccagttcttttaaaccgtgcacctactcttcaccgtttaggtattcaagcctttgaaccagttctggtacctggtaaatcaattcgtcttcacccacttgcttgtgaagcttacaatgccgattttgatggtgaccagatggccattcacgttccattatctgatgaagctgtagcagaatcacgtttgctgatgcttgctgctcaccatatcttggctcctaaggatggtaagccaatcgttacaccttctcaggatattgttttgggtaactactggttaactcaagcagagcgtggtcgtgaaggtgaaggaatgatctttgattcaccagctgaagcagctattgcatatgcaaatggtgatattcactatcatactcgtattggtttagcagctgactcaatgccagaaaagccatggccaaagggctacgaacatggaatttttgtaactacttacggtaagttagtattcaaccaaattttccctaaggatttctactacattaacgatcctactcaagagaatcttactcacccagtagatgaaagatacttcttacaaccaggtgaagatatccatgaaaagcttgacaatatgaaacttggtcaagcctttaagaagggattcttatcagattctattgctcaaatttacaaggattacaaagttcaaagaacttctgatttcttggatgatttgaaggaactaggctacactgtatgtactacttctggtttaactatcggtgttgaagatatccctacaattagtgataaagatgatattgtagcagaagctcgtaagaaagttgatgttgtttctaagcaataccgtcgtggtttaatcactgatgaagaaagacatgatcgagtaattagtatttggaataactgtaaagacattgttcaaaatgaaattgctcaaattattcatgcaccaagaaacccaattacaatcatggccgattctggtgctcgtggtaacatttctaactttactcagcttgctggtatgcgtggtttgatggccgctcctaacggaggaatgatggaaattcctgttacttcaaacttccgtgaaggtttgtctgttttggaaatgttcatgtccactcacggtgctcgtaagggtatgacggatactgccttgaagactgccaactctggttacttaactcgtcgtttggtagacgtagctcaagatgtcattattcgtgaagaagattgtggtactgatcgtggtttaactgttcacgcaattactgaaggcgatgaaatgattgaaccattatttgaccgtttagttggtcgctacacttctaagagtgtttacgatccagaaactcatgaagtaatttgtccagctgatgtcttaatggacgaagatatggctcataagatcgttgatgccggagttactgaagtaacaattcgttccgtatttacttgcaacactcaacatggtgtatgtaagaaatgttacggtatgaaccttgctactggtgacgacgttgaagttggtgaagcagttggtactgttgccgctcaatcaattggtgaacctggtactcagttaactatgcgtaacttccacaacggtggtgttgccggtgctgcagatattactcaaggtttacctcgtgttcaagagttgtttgaagctcgtaatcctaagggtcgtgctacaatttctgaagtaactggtgaagtaacttcaattgaagaagatccagccgaacacactcgtcaaattaccgttaagggacaaactgatactcgtacttatgacgtaccatatactgcttcagtagcagttgctgaaggcgatcatgttgtacgtggagataagttgactcttggttctatcgatcctaaggaattgattcgtgtacgtgatgcattgactaccgaaaaatacattctaagtgaaattcaaaaagcttatagaatgcagggtgtagaaattgccgacaaacacgttgaagttatggcacgtcaaatgcttcaaaaggttcgtattcttgacccaggtgaaaccgatatcttaccaggtgaattgatggatattggtgaatttaaggcaagaaaccgtgaagtaattatttccggtggtattcctgctactgcgcaaagtgtaattcttggtattaccaaggccgctcttgaaactaacagtttcttatctgcagcttccttccaagaaactactcgtgttcttactgatgcttctattcgtggtaagaacgatccattacttggtcttaaggaaaatgttattattggtaagattattcctgcaggtactggtatgccagtttaccgtgaaatggaacctaaagttgatgttcctgaagatgaaaagaaaaagtcagtttattctatagctgatattgaaaagaaattagctgcagctgatgcagagaaagacaatggttcagctgactaatcgtcctttcaaaacttaaacatttgtgttaaaaaagcctattcgtgtagaaacgagtaggcttttttgtgttattagagaaaattataaaatataagacttaaaaaaataaaaggaacaaagggataggtgtttcgtttgtcaccaactatgtgattaataagtaaaagaatagaagctaaaaggaaaatatattgtgcagtataaaaatcatagtaaaaaatcagaataataaaaatgattgtatcaccatagccgaatttattttttaaattcattattagaaaaattaaaattgtagtaattattaggatccattcagttatgtcgtagcttgaaaaagaacgattgagagagataagccaaattaacggcaaaaggacaaagataggaaaagagtggtcaaaataatcaaagatactaattagaaaaataaaggtaatgaataaataggaagattgatcaagatagggatttaaaggcaaaaatgcaatcccaccgagtaattcacaatataatgcttctataggaataggtgccttgcagaaaaagcaatgtcccttatatcgtataaatgaaaatataggaatttgattaagaagggtaagaggaattttgcaactatcacagtgagatttctctgagataaaattttcctgtccaaaacgttgtacgattactaacaagtgggaaccgatgatagttccgaatataaaattaagtccataaatgaataatgttggcattttttacctccaatatttatatacgcaaaattaaaaaaagttttttaaattgtttactgaattaaaaaatcgtgttacactagccattgtgctattaaaaacatgatgtccgtgaggtcagaaaagaaactcccggatgtgtgaacaattttaggaggaaattttaatgccaacaattaaccaattggttagaaaaggccgtcactcaaagacgactaaatctgattcaccagctttaaactatgcttacaacagcatgaagaaaaagatgaactacaacccagcacctcaaatgcgtggagttgcaactcgtgtaggtactatgacacctaagaagcctaactcagctttacgtaagtacgctcgtgttcgtctttcaaacttaattgaagttactgcttacatccctggtattggtcacaacttacaagaacactccgttgttttaattcgtggtggtcgtgtaaaggaccttcctggtgttcgttaccacatcattcgtggtgctttggatactgcaggtgttgatggtagaaaacaaggccgttctaagtacggtgctaagaagggttaaacagttaataggagggactactaatgcctagaaaaggtaatattgctaagagagatgttttagcagatccagtttacaactctaaattggttactaagttaattaaccacttaatgattgatggtaagaaagcaaaggcatcttcaattctttacgatgcttttggtattattcaagataagactggtaaggaaccagttgaagtttttgaagaagcaatgaacaacgttatgccagttttggaagttaaagctcgccgtatcggtggttctaactaccaaatcccagttgaagttcgtccagaaagaagaactactcttggcttaagatggcttgtttcatacgcacgcttacgtaatgaacatactatggatgaacgtcttgcaaatgaaattatggatgctgctaacaacactggttcagcagttaagaaacgtgaagacgtccacagaatggcagaagcaaaccgtgcatttgctcactaccgcttctaatcgttagtttgtaaaaggagattaatcttatggctaacaaacgtgaattccctttggataagacacgtaacattggtatcatggcccacattgatgccggtaaaactactactactgaacgtattttgtactatactggtaagatccacaaaattggtgaaactcacgaaggtgactcacaaatggactggatggaagaagaaaaggaacgtggtatcactattacttccgcagctactactgctcaatggaaggattacagaattaacattattgataccccaggacacgttgacttcactatcgaagtagaacgttcacttcgtgttcttgatggtgccgtaactgttcttgatgctcaagctggtgttgaaccacaaactgaaaatgtttggcgtcaagctgaaacttacggtgttcctcgtattgtttttgttaacaagatggacaagatcggtgctgacttcgataagtctgttaaatcattacatgaacgtttaaatgcaaacgcacaagctgttcaaatgcctattggttcagcagacacttttgaaggtgttattgacttaatcaacatggttgctgatgtttatgatgaagataaacttggttcaaaatgggatactattccagttcctgatgaatacaaggaagaagctttaaagcgtcgtaacgaattaattgaagctgttgctgatgttgatgatggcattatggacaagtacttaggcggtgaagaaatttctaacgacgaattaaaggcagctatccgtaaagctactttaaacttagaattcttcccagtttacgcaggttcagcattcaagaacaagggtgttcaaatgatgcttgatggtgttgttgattacttaccatcaccacttgacgtaaaaccttacgttgctcatgatcctaagactggtgacgaagttgaacttatggctgacgataagaagccatttgcagctttagcatttaagattgcaactgatccatttgttggtcgtttaactttcatccgtgtttacactggttcacttcaatcaggttcttacgtattaaatgcatcaaagaactctcgtgaacgtgttggtcgtttgcttcaaatgcacgctaactcaagaactgaaatttcagaagtattctcaggtgatatcgctggtgctattggtttgaagaacactactactggtgactccttaactgatccagctcacccacttatcttggaaagtttacaagttccagatccagttatccaagtatctgttgaacctaagtcaaaagctgaccgtgataagatggatgttgctttacaaaagcttactgaagaagacccaactttccgtgctgaaactaacccagaaactggtcaaactttgatttctggtatgggtgaattacacttagacatcatggttgaacgtatgaaacgtgaatttaacgttgaagcaactattggtgaaccacaagttgcttaccgtgaaaccttcactaaggaagctaaagcacaaggtaagtttgttcgtcaatctggtggtaaaggtcaatatggtgatgtttggatcgaatttactccaaatgaagaaggaaagggttacgaattcgaagacgctatcgttggtggtgtagttcctcgtgaatttattccttcagttgaccaaggtttacaagaagctatgaagaatggtgttcttgctggttacccattaattgatgttaaggctaagttatatgatggtagttaccacgaagtcgactcatcagaagctgccttcaaggttgctgcatctcttgctttgagaaatgctgcttctaaggctggtgccgttattcttgaacctatcatgaaagttcaagtaactactccagaagaatacctaggtgatgtaatgggttcaatcactgcacgccgtggttctatggaaggtatggaagatagagctggtgctaaagtaatcaactcatttgttccactttcagaaatgtttggttacgcaactactttgcgttcatcaactcaaggtcgtggtacatttactatggtatttgaccactactcaccaactcctaagtctattcaagctgacatcatcaaaaaacgtggtggcgaagacgctgaataattttaattagagagttaaagaaaagagatatcgaaggatatctctttttttgtacaaaaaaataaaataaaatgctgagaaagcttgctatttaaggaaagacacagtacaatagtaaacgtgcgaaaatattggaggggtataccccgtgcacaaaagcaatgctttgacgcaaaaggttgcggcacaccaggctgcattgccacagaggtgagtcggtaatttttgccgagctagtcatcttttaaagaagacgaaggaggttattagatggcaagtcaacaaattcgtattagattaaagtcatacgaacatggtattctcgatgaatcagctgctaagattgtagctactgctgaaagaacaggcgcacaaatttctggtcctgttccactacctacggaaagaactttattcactgttttacgttcaccacacaagaacaaggattcacgtgaacaatttgaaatccgtacacacaagcgtttaattgatattttgaatccaacacctaagactgttgattcattaatgaagcttgatttaccaagcggcgttgatatcgagattaaattataatttaaaacatatatggaggtgtaatcatgaccaaaggaatcttaggaagaaaggtcggtatgactcaaatcttcactaaaaacggtattttggttcctgtaactgttatcgaagcaacccctaacgttgttttacaagttaaaactaacgaatcagacggttacgaagcagttcaagtaggttaccaagatatgcgtgaagtattgagcaacaaacctgccaaaggtcatgctgcaaaagcaaagacttcacctaagcgcttcattcgggaaatccgcgatgtcgagcttaaggactacgaagtcggctcagaaatcacggtggactcatttagtgaaggtgacgtagttgacgttactggaactacaagaggtcatggtactcaaggtaacatcaagcgttggggccaatcaagaggtccagaaacccacggttcaagataccacagaatcccaggttcaatgggttcaatcattaaccgtgtacctaagggtaaaaagttacctggtcacatgggtggcaagaaagttaccgtacaaaacttagtaattgaaaaagttgtacctgaaaagaacgtacttttaattaagggtaatgttccaggtgcaaagaactcattaatttttgtaaaatctgctgctaaagctgctaaataggaaggaggactataatggctaatttagaaattatcgatcaaaaaggtaagtctgcaggtaatgtagatttaaatgaagaaatcttcggtattgaacctaatgaaagtgttgtttttgatgctatcattagacaaagagctggtaagcgtcaaggtacttctgctgtaaagaacagatcagctgttcgtggcggtggtaagaagccttggagacaaaaaggtactggtcgtgctcgtcaaggttctattagagctccacaatggcgtggtggtggtactgtatttggcccaactcctcgttcatacaagatggatatgcctcgtaaagcacgtcgtttagctatgaagtcagttctttcccaaaaagttgctgacaatgatctaatcattcttgatcaattaactttagaagcacctaagactaaagaattaaaagctatcttagataatgctaatgtttctggtaaggttttagttgtgtctgatgataagaatgttcaattatcaggtaagaaccttccaaaagtgaaagttgtacctgttaatggcttaaatgttgttgatgcggttgactaccaaaaacttgtattaactcaagacgctattaagagaattgaggaggttttggcataatggatgcacgtgatatcatcttacggcctgtagttaccgaaaaatccatgaacttaatggatgataaaaagtatacttttgatgtgcttgtatcagctaccaagactcaagttcgtaatgcaatcgaagaaatttttgatgtaaaagttaaaaatgttaacattatgaacgttcgcggtaaagaaaagagagttggtcgttacactggtaagactgctcgccgtagaaaagcaatcgttactttaactgaagattctaatgacattaagatcttcaatgataataaagaaaattagtaaataggaggtcagtcaattggcaattatcaaatataagccaactacaaacggcagacgtaatatgacttcttccgactttgctgaaattaccaagaaaaagcctgaaaagactttacttgaatctcaaagtcatactgctggtcgtaactcatacggtcatattactgttagacaccgtggtggtggtcacaaacaaaaataccgtatcattgacttcaagcgtaacaaggatgatgtaaaagcagttgttaaggctatcgaatacgatccaaacagaactgctaatatcgctcttcttcactacactgatggtattaaagcttacattttagcacctaagggtctaaaagttggtgctgttgttgaatctggtccagatgctgatattaagccaggtaatgcattaccattatctgctattccagctggtactgaaattcacaatattgaattaaagcctggtaaaggtggacaattagtaagaagtgctggtactgttgcacaagttcttggtaatgatggtaagtatactttagttagacttcaaagtggtgaagttcgtaagattttatcaacttgccgtgctactatcggttctgttggtaatgaacaacactcattaattcaattaggtaaagctggtcgtagtcgttggttgggtaaacgtccacaatctcgtggttccgtaatgaaccctaacgatcacccacatggtggtggtgaaggtaaggctccagttggtcgtccacaacctatgactccatggggtaagaagtctcgtggtattaagactagaaactctaaggctagaagtgaaaaacttattattcgtcaccgtaaaggtaacaaataattaaacgaaggaggttaattaatgagccgtagtattaaaaaaggtccttttgctgatgcaagccttttaaagaagatcgaagcccaagaaggttccgaaaagaaacaagtaattaaaacatggtctcgtcgttcaactattttcccttcctttgttggtttcacaatagctgtttacgatggaagaaaacatgtgccagtatacattactgaagatatggttggtcataagttaggtgaattcgtacctactagaactttccgcggtcacaaggtcgctgataaggccactactacagtaggtaaataataggaaggagagacatctaaatggcagaacaaattagttcagctaaagctgaagcaagaacagttcgcatcgctcctagaaaagcccgtttggtagtagaccttattcgtggaaagagtgttgctgaagctctcgcaatcttacaatttacgccaagagctgcttccccaatcgttgaaaaagtattgaagtcagctattgcaaatgctgaacacaactacgatcttgaaagtgcaaacctttacgtatcagaagcatacgttaacgaaggtgcaactttaaagagattccgtccacgtgctaagggtatggcttctccaattaataagagaaccagccacgtagtagttgtagtatctgagaagaacgattaagggaggtaaatttaatgggtcaaaagattaacccaaatggtttccgtctcggtgttaaccgtgattgggaagcaaagtggtatgcagacaaaaactacgctgacactttaaatgaagatttacgtattagaaagttcatctctgaaaagttagctgatgcatctgtttccactgtggaaattgaacgtgctgcaaacagaattaacatttctatccacactgctaagcctggtatggttattggtaaaggtggtaaggaagttgaagctttaagaaaagaacttagtgctttaactaacaagaacgttcacattaatattgttgaaattaagaagcctgatttagatgctaaattagtaggcgaaggcattgctcgccaacttgaagcaagaattgcatttagacgtgcaactcgtcaagcaactcaaagatctatgcgttctggtgctaaaggtatcaaggttcaaactgctggtcgtttgaatggtgctgatatggcaagaagagaatggcatactgaaggtagtgttccacttcatactttaagagcagatattgattatgcttgggtagaagctgcaactacttatggtcaaattggtgttaaggtttggattaaccgtggtgaaattttaccacaacgtaagaacaaaccttctaagaaagcgaagggaggaaactaatagtgttagtacctaagcgtgtaaagcaccgtcgtgaattccgcggtaaaatgcgtggtgaagccaaaggtggaaagaccattgcatttggtgaatatggtttagaagctgttgaatctcactggattactaatagacaaattgaagctgctcgtattgctatgactcgtttcatgaagcgtggcggtaaagtttggattagaatcttcccacaaaaatcctacactgcaaaaggtgttggtgttcgtatgggttccggtaaaggtgcaccagctggttgggtagctgttgttaaaagaggcaagattatgtttgaaatcggtggcgtttcagaagacgttgctcgtgaagctttaagacttgcttcaaacaagcttccaattaagactaagtttgttaagaagagttcggaagtaggtggcgaatctaatgaaggctaaagatatcagagcattaaccactgatcaaatgttagaaaaggaaaagcaatataaagaagaactttttaatttgcgtttccaacaagcaacgggtcaattagagaacaccgctcgcttgagacaagtccgcaagaacattgctagaattaagacaattcttagcgaaaaagaattgagcaagaattagttaacggaagggagttattaacttgagcgaaactaacgaaagaaataatcgtcacgtataccaaggtcgagttgtttctgacaagatggataagactattacagttgttgtagatacctacaagaaccaccctgtttataagaagcgtatcaagtactcaaagaagtattacgctcacgatgaaaacaacgaagctaagattggcgatactgttcgtatcatggaaacccgtccattatcacatgcgaagcgttaccgtctaactaagattgttaagaagtcaatttaattacgcggattttattgaggggaggataaactagtgatccaacacgaaagccgtttaaaggttgctgacaactccggtgcaagagaactcctagttatcaagattttaggtggttctaagcgtaagaccggtaatattggtgatatcgtagttgctgctgttaaacaagcaacaccaggtggcgttgtcaaaaaaggtgatgttgtaaaagcagttattgttagaacaaaatcaggtgcacgccgtgaagatggttcatacatcaagttcgacgaaaatgcagcagttgtaattaatgctgataagagtcctcgtggaactcgtatttttgggcctgtagcccgtgaactgcgtgagcacgatttcatgaagatcgtatctcttgctcctgaagtcttataattttttagggaggtgcactgatgtttgttaaaacaggtgacaaagtaaaagttattgccggtaaagataaaggcaaagaaggcactgtactttcagtcaacgccaagactaaccgtatcgttgtcaaaggtgttaataagatcaaaaagcatgagaaaccttcacaaaccaacgctaatggtggtgtggtagaaaaagaaggttctatccatgcatctaatgtaaaagttattgctaaaaaagaagataacaacaaataggagggaggacgcacatggcaaacagtttagtagaaaaatactcaaatgaaatcgcaccagctatgaacaaaaagtttaattacgattcagttatggaaattcctaagattgataagatcgttttaaacatgggtgtcggtgatgcagtttctaatgcaaagaatcttgatgaagctgtagaagaattgactttaatctcaggtcaaaagcctttgattactaaagctaagaaatcaatcgcaaacttccgtttacgtgaaggtatgtctattggtgctaaggtaactcttagaggcgatagaatgtacgatttcttgtacaaattaatcaacgtttctcttcctagagttcgtgatttccgtggaattagttctagatcatttgatggtcgtggtaactacactttaggtatcaaagaacaattaattttcccagaaattgattacgacaaggtaaaccgtgttagaggtttggacgttgttattgtaactactgccaagacagatgaagaagctcgtgaacttcttactgagtttggtatgccttttgctaaataatttggaggacattaatggctaaaacatcacaaatcgtcagaaatcatcgtcctgctaagttttcatctcgtgaatacactcgttgcgagagatgtggccgtccacactctgtttaccgcaagttcaaattatgccgtatttgcttaaaagacttagcacacaagggtcaaattcctggtgttaaaaaggcaagttggtaattaacggtaaaggaggcaaattaaatggtcatgacagatcctattgcagattacttgactagaattagaaatgccaacatggcaaaacatacttctgttgagattcctgcatcatcaatgaagaaatcacttagtgaaatcttaaagaacgaaggctttattcgcgattaccaagttgaagatgataacaaacaaggtatgatcaagattttcttgaagtacggtcctaataacgaacgtgttatttcaggtttaaagcgtatttctaagcctggtttaagaaactatgtaagtgctgaaaacttaccaaaagttcttaatggtcttggtattgctatcatttctacttctgcaggtgtgattactgataaagaagctagagaaaagaacgtcggcggcgaagttattgcttacgtttggtaattttgacagaaaggagaactattaatgagccgaattggtttaaaggtcatcgaggttcctgaaaaggtcacagttaccaaaaatggtgacgacatcactgttaagggaccaaaaggtgaattaactagatactttgatccacgcattacctttgaacaaaaagatggagaaattcattttagtcgttcaagtgaagctgacaaagctcttcacggtactgaaagagcaaaccttgcttccatgattgaaggtgtaactgatggatatgttaaaaagttaactttagttggtgttggataccgtgcagttgcacaaggtaagaaattaactttaaatgttggttactctcacccagttgaatttgaagcaccagaaggtattactgttaaaactccatcagcaacttcaattgaaatcgaaggtatttcaaaacaagttgttggtcaatttgcggcagaaattcgtgacgttcgtccaccagaaccttacaagggtaaaggtattcgttacgaagacgaatatgtacgtcgcaaggaaggtaagactggtaaataataaatagaaaatttttgaggtgaaattgtgatttctaaaccagataaaaacaaattacgcttaaagcgtcataaacgtattcgtggaaagatttctggtactgctgagcgcccacgcttaagtgttttccgttcaaacaaaaacatctacgctcaattaattgatgatgtagagggtgtaacgcttgcaagtgcctcaacaaatgataaaaatatttcagcagaaggttctaaaatggaacaagctgctgaagtaggtaaagctttagctgaaactgctgctaagaagaacatcaagagtgttgtatttgacagaagtggttacctataccacggtcgtattcaagctcttgctgatgcagcacgtgaaaacggattagaattctaggaaaggagaattaactaatggcaaaccgcaacgattctcgtagagattctcgtaaagatcgtaaaaaagacgatattgaagatcaattagtagcaattaaccggatcaccaaggttgttaagggtggtcgtcgcatgagatttgctgctgttgtaatcgtcggcgatagaaaaggtcatgtaggttttggtactggtaaggctcaagaagtcccagaagctatccgcaaggctgttgaagctggtaaaaagagaatgattaaggtacctactgttggtactactattccacatgaagttatgggccattacggttctggtaacattatgttgaagcctgctgaagctggttctggtgttgctgctggtggtgctgttcgtattatcatggatttagcaggtatttcagatgttacttctaaatcacttggttcaaatacaccaatcaatgttatccgtgctactatggacggtttgagtaaattaaagactcgtgaagatgttttgaagcttcgtgagtcagcaaaaagcttagaagattaaggagattaaataatggatttaaaagttaccttaattaaaagcgtcgcacaccgtcttccaaaacaaagaaaaattgttaaagctcttggtcttggtaaggtaaatagcactgttgttcttccagacaacgctgcaactcgtggcgctttattgaagattgctcacctgatctcagttgaagaggttaataagtaattagaatccaaggaggtgccaattaatgaagcttaatgaattaaaaccaaatgaaggttcacgtcgcaacagaaaacgtgttggtcgtggtacttctagtggttacggtaaaactgctggtcgtggacaaaagggtcaattagctcgtactggtggtaagactcgtttaggtttcgaaggtggtcaaatgccattattcagaagaatgcctaagcgtggtttcaagaacgttaaccgcaaagaatacgctattattaatttaaatgatttaaacagatttgatgatggtagtgaagtaactatcgatacattaaaatcatcaggtttagttaaaaaagaacttgcaggagttaagttgttagctaacggtgaattaaaggttaagttaactgtaaaagttaacaaagcctcagaagctgctaaaaaagctgttgaagccgctggcggaactgttgaggtgatctaatgttctcgaccttgaagaacgcctttaaggataaagatattagatcaaaaatcttctttactctctttatcctattgctttatcgaatcggagctaatattacggttccgggtgttaatgcaaaagctattacacgggttgcacaaactggtttagtcccaatgttggatacagttagtggtggtggattagatacttattctattttttcattaggtgtttcaccttacatcactgcccaaattgtcattcaattactccaaatggatattgttcctaagttagttgaatgggggaaacaaggagaagtcggaagacgaaaaacaaatcaggtaacgcgctatcttactttagtcgttgcttttgttcaaagtctaggaattactcttggttttaacgttttaactgaaatgggtttggttaaaacgcaaactcctcaaacctatattgagattgccattattatgactgctgggacaatgcttttgacctggctaggtgatgaaattactgataaggggctcggaaatggtgtatctgttattatttttgcaggtatcattgctcgccttccaaatggaatttatcaactatataaagatttcatcattaataatagtgctagcgatcgttggcaagggattttgttcttcatcgcgatcattattgccattttactagtaactcaatttgttacatggtttcaacaagctgatttacgagtacctattcaatatactcgtagagcagcaacaagtggctccgaaagtttcctaccattaaaggttaacgtgtctggagttattccagttatttttgccagttcctttattattacaccagctacaattttgatggctttccaaagatctcatggaaatgaacaatggtttaagatttgtaatcaaatatttagtttacaaactacacctggtgcactgatttatacactattgattattttgttcactttcttctatgcctttgttcaagtaaatccagaaaagttggctgagaacttgcaaaagcaaggagcctatattcctagcgtttggccaggaaaagatacacaaaaatatgtatctaaaattttgattagattatctacagtaggtgcggtatttttagggctagttgccttgttaccacaacttgctacaaatatttttggtttaccaagttcaattggtcttggtggaacgagtcttttaatcgttattggtgttgttttagaattagctcgtcaagttgatgggttactaatgaaacgcgaatacgttggatttattagatagtaaggataaaaatgattaatttaattcttttaggtttgcctggtgcaggcaaaggaacagcttctgaaagcattgtggataagtatcacttagcacatatctctaccggtgatatgtttagagaagctatggctaatgaaactcctgttggtttggaagctaaaagttatattgataaaggaaatttggtcccagatgaagttacagctaagttagttgaagaacgacttaagcaacccgacactaaaaacggattcatcttggatggatttccaagaaccactgttcaagcagaacttcttgaagatataactaaacggttggaaaaaccgttaactaatgtaattgcaattgatgttgatgaagatgttttgatcaaacgtttatcagcacgttacatttgtaaaaaatgtggtgcaacttacaataagatttcaaatccaactaaagtagaaggtacttgtgatcgttgcggaggacatgaatttttccaacgtgaggatgacaagccagaagttgttaaaaatcgcttagaagttaacaagaaaatgaatactcctcttcgtgatttttatgaagaaaaaggaattctttcaactgttaacggtgaacaaactccggaaaaagtatttgaagacattgacaaaattttaagtaaagactagtctgttattgtttttttacaattccgtgttataatgcctaagtgtgactatttgttcatgtggaggaacaattttggcaaaagaagatgtcatcgaagttgagggtaaggtagttgataccttacctaatgctatgtttaaagttgaattagaaaatggtgcaactattttagctcatgtgtctggtaaaattagaatgcactacattagaattttacctggtgatagagtaacagttgaattatcaccatatgatttaactaagggtaggattacgtatcgttttattaagtaattacggaggcaaacatgaaagttagaccatctgttaaaccaatgtgtgaacattgcaagattatcaaaagacagggtcgtgttatggtgatttgctctgcaaaccctaagcacaaacaacgtcaaggttaatagttagatatttttattaggaggtgcaatttaatggcacgtattgctggtgttgacttacccagaaataaaagagttgtagtcgcattaacttatatctatggtattggtgaaccaactgcaaaaaagatttgtaaagatgctggtatttctgaagacattcgtactaatgacttgactccagaagatcaagaaaaattacgtagcgaagtagacaagtaccgtgttgaaggtgatcttcgtcgtgaagttagccttaacatcaagcgtttagttgaaattggctcataccgtggtattcgtcaccgtcgtggcttaccagttcgtggtcaaaataccaagaataatgctcgtactcgtaagggttcaaagagaaaataatttattaaataggaggttaagttaatggctgcaaagaaaacagcacgtaaacgccgtgtaaagaagcatgttgaaagcggcgttgctcatattcattctacgtttaacaataccttggtcatgattactgatgtacaaggtaacgcagtcgcatggtcttccgctggtgctttaggttttaagggtagtcgtaagtctacaccatttgctgctcaaatggccgcagaagcagctgcaaaatctgcaatggatcaaggcatgaagcatgttgaagtttcagttaaaggcccaggtgcaggtcgtgaagctgctattagagcacttcaagctgcaggtcttgaaatcactgctattcgcgacgttactccagtgccgcacaacggttccagaccaccaaaacgtcgtcgtgtctagtttattcctgcgtgcaggacattacgttttgaaaggggcccagtaatgattgaatttgaaaaaccaaatattaccgtagtagaccaagaggaggcatacggtaagtttgttgtcgaaccactggaacgcggtttcgggactactttaggtaactcactccgtcgagttttacttacttctattccaggtacggcactttcttacattcagattgatggtgtgttacatgaattttcaacaattcctggcgttagagaagacgtcacgaagatcattcttaatttgaagaaactagagttaaagtcactctcagatgaagaaaaaattgctgaaatcgatgtaactggaccagcaattgtaactgctgctgatttgaaggtcgactctgatattgaggtcttaaatccagatcaatatatttgtagtattgctgatggtggccatttgcatatgaacgttgcgatcaagactggtcgtggttatgttcccgcaagtgaaaacaagacagatgacatgcctattggtgtcatccccgttgattcactcttctcaccaatcaaaaaagttaactaccaagttgaaagtgctcgtgttggtaagagagatgactatgacaaattaactttagaaatttggactgatggttcaatcacacctaatgatgcccttagtttcgctgcgaagattcttgtagaacacttcaaagtatttatgtctactgatatggatgcgcagtttgatgatgtaatggtagaaaaagaggacgataagaacgaaaagaagcttgagatgacgatcgaagagcttgatttgtctgttcgttcctataactgcttgaaacgtgcaggaattaatactgttcaagaattaactgataaatctgaagcagatatgatgcgcgtacgtaacttaggacgtaagtcattagaagaagtaaagaataaacttgccgatcttggtctatcacttcgtcaagatgactaagtaggaataataaggagggaaaactcatggcataccgtaaattaggtcgcgatagtgcacacagaaaagcaatgcttagagaaatgactactcaattgatcatgaacgaacgcattgttactactgaaacccgtgctaaagaaatccgcaaaactaccgaaaaaatgattactttaggtaaacgcggtgatttaagtgctagaagaaaggcagctgcttttgttcgtaatgaaattgctgatattcatgaagaaaaagatgcagttgttgtaaaatcagcacttcaaaaacttttcagtgacattgcacctcgttacaaagatcgtaatggtggttacaccagaatgtacaagttagctaacccacgtaagggtgacgctgctccaatggtaatcattgaattagtttaattaggtaaaatataatattattttataaatctttcacaaaagcgagaataagcgtgatgatggtggcttttgcctagtctagcttagatgttaaatcatccctctttgtggatgatttttttttgctctttttttatatataattgatacaatgacatattatggaaaaagagcagtgaatatttatgaaagataatatagtaacggttaagcatctttcttttacctataaagatagtaaagtacctgctgtaaatgatattagtttctcaattcctagaggatcatggactactttggtaggtcataatgggagcggaaaatcaacaattgcccgtttattggatggcattcttttaccccatgataatcctagaacggtaattaacgttgatggtattgagctgacagagaaaacaatgtgggatattagagaccgtgtaggaattgtattccaaaatcctgataatcaatttgttggtgctacggtggaagatgatgtagcttttggtcttgagaatcgtcaagtttctcgttctaagatgcagactattgttcatgatgtgcttgagcaagtggatatgcttgactttcaaaaaagcgaacctcaatatttgtctggaggtcaaaagcaaagagtagctattgccggcattttagcgattggaccaaaattaataattttagacgaatcaactagtatgttagatccagcaggtaaaacgaaaattcttagccttatacgagatttacaaaataaaaatggtctgactatcttctccattactcatgatattaatgaagcggtacaagcagaccagatgttagttttagataaaggaaaattattggctagtggctctccaagagagatatttgaaaacgaggttttaataaaaagtgccggattagagctccctttattttataaggttaaaaatgaacttataaaaaaagaaattcatatccctcgagaagtcaatagtgaggaaaagttggtgaagtatttgtgtcaattgaattcaaaaatgtagattatgtttatgcacctggaactccatttcaaactcaaggattgatagatatatcttttaaaatagaaaaaggatcctttgtagcaattgctggccataccggaagtggaaagtctactctcatgcagcattttgatggcttattgcttccaagtaagggtgaaatcactgtagcgggtgagcagattaatgcaaatacttcaagcaaggcactaaaagcaattcgaaaaaaagtgggcctagtgtttcaatttcctgaaaatcaactatttgaagaaactgtgcttaaagatgtgatgtttggtccacttaattttggcttttcagaacaaaaggcaaaagagcaagcagtagagtggattaaaaaagtaggcctttctgaagatatgatggataaatctccttttgaactttctggaggtcaaatgcgtcgcgtggcaattgcaggtgtgatggcatatgaaccagaaattttatgtcttgatgaacctgcagctggactagatcctgaaggacagaagcaaatgtttgagatatttaaggagtaccaacgagctggccatacagtcattctaatttcacataatatggatgatattagtgaatatgcagatgatatgttagtccttgatcatggtcatttaataaaacatgctagtccacaagagattttttctgatcaggagtgggtaaaaaaacactatctcgatgaacccgcaactagtagactaactcgggagctacaaaaaggtggttttcaattttcagagatgccactaactattgagtcgttagtaagtaaagttgcaaatgagctaaagaagaagggggacatggatgagtaaaattattattggacgttatattcctagtaattctatcgtttataaaatggatcctcgaggaaagataattgcaacatttttatttattgttattatctttctggctaataattggttgtcctacttctttttatcgatatttactttacttgctgtttgggcaacaaaattaaagcctaaagtattttgggatggagtaaagccattaatttggttaattctatttacttcagttttgcaattgttttttactacaggtggaaaagtttattggcagtggggaattttcaacattagtgaatatggtattcagaattctatttttatctttattcgttttgtaatgattattctgatttcgacagttcttacgctgacgaccacatcattagaaattgcagatggaatggaatggatcttaaaacctcttggctacctaaaagttccagtagctcaaattgctcttgtaatgtctattgcgcttcgctttgtgccgacattattagatcaagcagtacgaattatgaatgctcagagagcacgtggagccgattttaatagtgggggcttaattaagagaattcattcgattatcccaattttaattcccttatttattagttccttaactgttgcaattgatttggctacggctatggaagcaagaggttatcgagaaggggcaaaaaggacgcgctatcgagttttaaagtggtcaaagtatgattggattaacttaggttattttgcgctattgacgctaattttattacttacaaggacgtattaattaatgactacaagatataaattaaccatggcctatgatggtcatctttttcatggatttcaaattcaaccgaatcaacgaactgtccaaggcgtgattgaagaagcattaaaaaagatgactaaaggaaaaagagtggtagtgcacggatctggaagaactgatgctggtgttcatgctaaaggacaagttattcactttgactatccaggaaaagaaattccagctaaaaatatgatgcttgctttaaatgccctcatgccgattgacacagttttctttgaaagtgaaattgttgatgaagattttcatgttcaatattcaactaaaggaaaatggtatcgatatgtagtggatcaacatcgttttacagatccttttaatcgtttttatacaggccactatccctatcctttagatatttcgctaatgaagcaggcagctaaagatttgattggtgaacacgattttactagttttgctgctagcggtggacaaattgtggataaggtgcgaacaatttactatgtgaatattacgccagacccagataaaaaacagatcatttttgattttattggaaatggctttttatataacatggtaagaatcttagttggaactttgttagaaataggcaataaaaaaagacctgttgatgatataccaagagttttaaaggcaaaagaccgacaagaagttcgaactactgcaccagccagtggactatatttacaacaagttttttatgaagatattcctaaaaaatatcgtttggaccttaaaaaggattgacttttcaggcaaaacgacgtaaattagtatacgtatgtttgtccacgataggccccggaaacttattgtttgtcaaacagaagaaaaacggaggaatttaaagtgcgtactaccccattagctaaaactagtgatattaaacgtaagtggtatgttatcgatgcgactgatgtttcacttggtcgtttatcaactgctgtagcatcaattttaagaggtaagaataagcctcaatatacaccaaatgttgatactggtgattatgttattgttgttaacgcagctaaattgaagttgactggtaaaaaagcaactgataagatctactaccgccactcagattaccgtggtggcttaagagctactcctgccggtgaattattagctaagaacccagtaagattagttgaattatctgtaaaaggcatgttgccaaagaatactcttggtcaccaagaattcatgaagatgcatgtttacgctggtgaagaccacgaacacgcagcacaaaagcctgaaaagttagacatcaacgaattaatctaggaggttttaaataatggcacaacaagcagcttacgctggaactggtcgtcgtaaagattctgttgcccgcgtacgtttagtaccaggtaacggtcaaattaccattaacaaagaagacgtaactaagtacattccataccctaacttggttcaagatatgaagcaaccattagcattaactgaaactgaaggtcaatacgacattttagttaacgttaacggtggtggtttctcaggacaagctggtgcaattcgtttaggtattgcacgtgcacttcttgaagttgacccagatttccgtggtcctcttaagaaggctggcatgttaactcgtgacccaagaatgaaggaaagaaagaagccaggtttgaagaaagcccgcaaagcttcacaattctcaaagcgttaatattttatattacgttttatgcaaaagacatctcgaaagggatgtcttttttgtttagtatgtgatagcatacatttaatcttaattactaaaaaattgtgagtagaagtgaggaaaatattatgaacatggataaaaaagatctgaaagaagacctatatgttgcttatagtgtatgttttgtactattagtagcttctatattttccgatctgatatcatggtcatgggtgcgcacatttgttagagtaggattcggattatcattaatagatacacttaatgatcaatggaagtattttaaattgagaaaagacatatcaaaatcatagatagctgtgaagtaagacctaaaggtgaaatacttttgggtcttttttctgtctaaatttaataagaaaaaaagatagattgaatatttcataaaatagtaataatattaaatctatcttaatattttggagtaacacaaattaacattaaaggtatttttaatacgaataaaataagattcattagtatttgtatcttattaatcctagagacagctagtgcaacaagtgttacatatttaatgacacctgcatttaattatataaagcaaaataaattaaatttatttttaatatttattactttatcagctagcttgcaatttataagtacaattttaacttcccttggtaatattctatatgctcatcaaattcaggattatattcatcagattcggaataatattactagatatctatttgttaatgacgatgaaaatgtgtctgaaattcaaaataatctaaattcgaatattcaggaattaactaataaatataccaatcctttattcattttatggcgcaggatattaactattgctttttctctgggagtcttatttacctttaattggagtttagttgttttaactttgttgctgtcttttgtcggtctttatttaccaaaactttttgagaaaatgacatcttccgctactcttgaagttactcaaaaaaatgaatatctgcttgatacagtagagaaatgggctcgaggattagatgaattaagaaggtatgccagttttggcagctatgaaggtgcaataaagaaatcaacctcggagttaaaagcagctacaattcaggattgcttctggggaaatttggcgactgcacttacatctctaatatctttaataggcataattttgctattagcactttcaatatatttgtatgcgacaggacagattgtctttggtgctatcattacttctggaatttttgcaaatcaaattatgaatgctattacctatttagcggaaagcctcaatcaaattaaatcttctaagaaagtgcgccttaagattcttaacttgcaagaatcagtacaatttaatgtaaaagacaattctgataaaagaattaacaagattgaaattaatgatcttcaagtctcttatccaaatggagaaaggatttcttatccacatatagtcgttaacaaaggggagaagatactcttaactggagatagtggtagtggaaaatcaactttatttaaagttttactaggtgaagttacacctaaaatgggtacagttagctataaagataaagaaggaaaagtatttataccgaatccagaagaaataggatatcttgcacaagataatacgctttttcccgatactatcaaaaataatattacaatgtttgattccaagttagataaggaagttaataatacaatcaaaaaggtaaatctttctactgatattgaaaaatttcccaagggattaaaaactttaattaacttagactctgaaaacttatctggtggtcaaaaacaaaagatagttttagcccgagctaacatccatcatagtagcttgctcttgattgatgaagggacgagtgccattgatagtaaggcaactttatctatcttaaaagaattattgaagtcagaacaaaccattattatgattgctcataatctttcgcaaaagtcgattaatatgtttgatcgagagattcatttgaataaagaggtgaattaaatgtcttttcgaggatttatcaatactaataggactcgtttcttttggattactattttatcaattttatcagggatgagtggtattctggctggctatatacagatgtattggttgacctatattaaagagaaaaattggaatgaggttatagttacaactagcttaatggctctatgctggttctttgctcaatcagtgatttattttgttcaatatttaaataatgttcaagaagaagaatatttcaagaaattacgcgatgaaatagccgagcattattttaaagatcaaaaatttcatgaagtagccgcttttcaaaatagactaactaatgatttcaacattgtaaaaaataacttttttgaatggtatgtaactgttcctttttatggatcgatgttaataacctctttgattgcgttactaacaatccattggtcaatttttgcattaagtttagttgtagatactgtttcatattttttacctaaactaattagtaaaaaaatagagaaaactacaattaacgtttccgataagaataaagaatatcttgcgatattgagtaaatggttttctggtttaagtgaattaaaaagatactttgcaggtaataaattattagaagtgcagagcaaagcatcaaggagactagaaaaagcaaatattaatcaaacgattcaagaacagatattaagtatcttaaatggcttcagtgctttggtttctacaattctattattaggatttactggagtattagttgaacaaaagttagtcatttttggtgcgattttatcagtacaaaattttgcggataatgtggcttttggaatgcaagaaactattgaaggattgacaatgatgcgttcctcaaaaccattaatgaataaaattagtgaagatacagcactacttgaatcgaacaataaagaagaggccagtattccttccgtaattaaaactaattcattgtctctgaaatttcctaatggtgaaatgttgaagtatcctgacataaatataaaagagggtgaaaaaattctcttaactggtgattcgggatcaggtaagacaaccttatttaaattactattaggaattattaaacctagttatggaacgatagaatttgaagaccaggatggcaatactgttacacctgatatgtctaaaattggctatatcccacaagaacctaatctttttcctgggacaattaaacaaaatattacgatgtttaatagtcagcttgataatcgagtaaacttggcaataagggatgtcaacttagatgatgacatgaaaaagtttaaagatggcgtaaattctccgttaaacttagacaaattaaatatttctggtggacaaagacaaaagatcgttatggcccgtgcacaaattcatgacagtaaaataattttaattgatgaagggacaagtgctattgatcaacaggctacttttaagattttaaagaaattattgcaaactgaggcaacaattgtttttattgctcataattttaatgaaaatatgcggaatttgtttgatcgagagattagactatgaaaattttagacagggaaaaatataatgacaacagtctattttgtaagacacgctgaaccagatttaagtaatcataatgatttgacaagagatttaactccaaaagggatagaggatcgaaaatttttaattgattactttaaaaataagaaattagacgtggcattttcaagtccttttagaagagcaattaggactattgagccagttgctaaaagtagaaatttaaaaattaaccaaatttcggaattttgtgaacgtaaaattggcgatgagtggatttctaattttcatgaatattgtcaaaaacagtggtttgattttgactataagttagaaaatggtgaatctttgaatgatgttcaaaaaagaaatatgaacgcgttaaaaaatcttttaactgatcgctgattgtaaaattaaattgaacacttgataaaaaataaaaagtccattcggacctgtttgatagaatgttaataaccacaaaaactttctattggaggtcaaaatggactctttacattctaccatgaaccagcacgttaaaggcaagcatttatcatttgaagagcgagttattattcaattgcgtttgaaagatggctattctttgcgtgcaattgcccgtgaacttaactgttctccttctactatcagctatgaggttaagcgtggcactgtaaaactgtatcatggtaaagtcaaaaaatataaggctactcaagggcatgatgcatataaagctcatcgtaaaaattgtgggcgcaaatcagactttctcaggaaagctcaattcatgcgctatgtccacaagcatttttttaaagatggctggtcgcttgatgtgtgcagtaatcgtgctactgctgttggcgaattcgctagcagcgatgttgtctgcaccaaaactctttataattacgttgatcaaggcttattaggaatttataattacgacttgccagagaagcttaaacgcaatactaagcttcatcgtattcgcaaaaataagaaaaaacttggcagaagcattgaagaacgtcctaaagagatcaataaacgtaatgaattcggtcattgggaatgcgatttagttctcggacataagagcaaagatgatgaggtactgctaaccttatctgagcgtatgagtcgtgagtttttaattcttcgtattcctgacaagacttctgtcagtgtcatgcaggcctttaaagaactccaaaggcaatacagcgaacattggaatgatatttttaaaaccattaccactgataatggctcagagtttgcagatctttccaacctagaaaaagtatccaatacactggtttactatgcccatccttacacttcttgtgataagggaacagttgaaagacacaatggtcttattcgcagattcattcctaagggagaagcaatagctaactattctttacaagacatcattaatattgaaacctggtgcaattctttgccaagaaagatactggcctatcatacaccagatgaaatctttgaaagagaattagatctaatctatcaagcagcttaactaaaagtgttcaatttattattgcaatttgctaaaataatccatttgtaatgtctccattttatgcatatgtaccaaggagacttgctagctcaggaattgaatacagtattataaaaaatagtttgtatgcagatccactggtcccatatatagaagaactaattaaacgaaaaaatattatttatccagttggggcagaaccactatcctttattacaagaaatgatagtgctcatgcaattgcgtgtttagcaatgcagccagtaatgcgcgatcaaggccaaacatatctattaagtatggacaaaaattataacatggttgagctatcatacattatgtctcggatcactgatcataaaattggctatgcacctgtaacaacgggtgaatttgcaaagatttatgccgctgaaggcgatggaaaagaacttgcatcaatgtatgccggaggagcgaagggacttcttagtgcaacatctgatgactttcatcgcttaactggtagagaaccagaagaaatggaacattttttaagaaatggctatcaaattgcacgtttataaaataaattagtttaatttaaaataaaagatgttataataaatatagtaagtgcttagagaaaaattaattgtaattaagtgtagtgcagtgctgagacaagaccgtaagcttgctattaactacacaagcttttaatttaagggatagattaaaagttattttagctgttatatacgaaaaaagagatcagatataaaatctggtctctttttcgatatgtttaactataggctttgattaatatttttagctagataatcataaagcattgctttttctaattctttggtgtcataacctaaagtttgagcaattgtataagcgtatgcccaagctgtagctggtccacgactagtgataattttgtgttctttatccacaactgtaatatcagtgctaaagtggccgtttggacattccttttcaatttctttttcaaagcctgggtaacaggtgtagttggctccttctagcaagccgtagtgacctaaagcaatcggagcggcacacattgctgcatcccatttgccttctttatttctttgaatcataagcttagctaatttttcattgtttctaaggtttaaagctccagttcttccacctggaaaagctactaagtcatactctaaaagtgaatcatccacaactttatcacaggttagtaagatatgatggtctccgttaatttcttttttatcaagaccgaccatgtcacaatcaatatctaagcgacgtagtacatcaacgacactaagtccttcaacttcttcacagccatccgcaaagacaacagcaactttcgtcataaaaaagtcctcctttttattaagcactatacaacttttattttaacccattaaaatagtaatttttaatttaaagattaaaaaaataaatccaaaattgcgtacataataatagctaacctatgagatattgtactaataattttgtgaaacactaaatgtagtgttacctttaaaaatacttgaattaacgcaatattctgttaacatttagataattgaaagaaaatttgtgaaacaatttaagaaaagagggtaaaaatggctactgaagtttatttagtaagacatggggaaacaatgtttaatcagttgaataaagttcaaggctgggctgattctccactaactgtaaaaggaattaatgacctaaaagtaacagcatctaatttatctcaggttcattttgataaaatgtatagttctgatttaaagcgagccattgatacagttcacttaattgccgatacaaatgaagtttctgagattggtaaaataaaaaaacttccagcttttcgtgaagtattctttggtacttttgaaggtgacgatattgacgaaacttgggaaaaagttgctgtagctggagggatgaaaccaacaaatgatgtggtaaaaatcattcaaaccttaggaatccatgattttcgtgaagcaactaagaaagctgatccacgtcatttagcagaagatgcagaagccctcaataatcgaatggaccaagccgttagccaactagctgaagaaacaaaagggctaggacgagttttaattgtgtctcatggagactttattaagactttgggaattaaatactgggatcaaactacgcatgatcacgatattccctttccagacaatggcagtgtgacgcgtggaataattgatgataatggaaaatttaaaataattaattatggtgtaaaaaacactgacattccaaatttataagatgcagctatcaagttgcatcttttttagtataagtttgtgggatgttctttggcagtatgttctacatgttcaatcatggcgtcaatcattgataaaacatcaggatcatttaaaaaataaaagacatgagttccatgtttatgatgtttaaccaaattgtatttttctaaaatgcctaattgttttgatacaaccggctgcgccaggtcgagagtagtggcaattgttgagacgtcgacttcttttgaagcattccgtaaaaaaaataaaattgaaattcgtctactattgcttaaaactttatagattttagctgcttcattaactagatttgtatctaattgtgtcattatttaaaacctcattgacaatatatcaaaaatggaatattatactttctgcaataagtataccaaattcgatatatttatggagaaaaaatatgaaggataaatcatcactacgttacttttgggtaactttattaaatattattattacaattgcggaatttatcggtggagccgtttcaggctcacttgctctgctttcggatgccgtacataatttaagcgatgttggatcaattattttggcctttgtggccaatttaattgctaaaagaaagcgaaataacagcaagacttttggctatgatcgagcggaaatactagcagcttttactaatgggataattttaatagtaatcagtatttatttatttatcgaaggaattcaacgatttagtcatcctgaaccaattaaaggaaaaatcatgttaattgtttctttaattgggttagctgctaatttaatttcaatgctagtagtcatgaaggaagctaagacgagtcttaatgcaaaagctacatttttaaatatgctttcagatgcaataactagtgtagcagttgttattggagcgattgtgatttcaatttggaaaatttactgggtcgatccagtcttaacgatagcagcctctgtctttttacttaaggaagcttatgaagttactattaaagctgctaatattttaatggaaacgaatcctagcattgatttaaataagataaatgaattagttttatcttgtccacatgtgaataacattcaccatgtgcatgtttggcaatattcagacaatgtgacgatgttagatgcacatattaatgtggataaaaatttagacgctgtgcagttagaaaagatatacacagaaattgctagaaaattaaagccgcttggaattaaccatgtgacacttcaagctgaatgtacacgtggacttagcgataaaatgatttttgatgataaagaagattagttaatctggttttgctgctatttggtaaaataggggcaaagccttttattttaaggagaaaaaaatgagattcgatactaatgatctaaaagaaaatctaaaaaattatcaaaaaaaagctacagaccagtttaaggattttgctgaaaatgattggcctgatattaaagaccacttaactgaaaaaggacaacaggctggagattttttgaaacaaaatggtggaaaagtttatcaaaattctgttaatgcttttaaaaaagcagttcgaaacttagaccaaaaagtaaatggtacaagtgtacataaggacaataaataataatgaaggtaaatatttgggtcgcagtcatagttttatttattggattatgggatttatatacggcatataatcgttatcaaaaacataaagtaacagcgaaagtaattcaaaatgatcctactaatggaacaaaaaaattgcttactggtattccatctgatattaaagctgatatcatttcctttacaatcttaggtgtcgtttttactattaccggaattattttgttttttatggtttaaatggggtaggtgaaaagaaagttggccaaattagttttggttagacatggtgaaagtgtagctaatcgtgacaatgtttatacgggctggaatgatgtacctttaagtaaaaaagggattgcgcaggcaaaaaatgcaggccttaaggtagaaaaaatagctgaatttgcaccaacgcatatccatacttctgtcttatcgcgtgcaattatgacggctaatattattgcagatgtgtgcagctttttatatttaccgatcactaagacttggcgtttaaacgagcgtcactatggagcacttcgcggtattaataaggatgtttcaaagaaaatttttggtactaatcaagtcttagaatggagacgtggttttgatagtgtgcctcctttattaacgcagcccgtccaagatcgtagatatcaaaagtatgatatgcgtttaatgcctcagggagaaagtttacatcaaactcaagaaagactaatgccttatttttgggatcatattgcacctgaattaatggcaggtcatgatcaattggttgtagcccatggctcaagtttacgtgccttgattaaaaaaattgaagatatcagtaatgaggatattgtaaaagtagaagtgcccaatgcggagccaattgtttatacttttgatactgatttgcatattgtaaagaaagaaattctacattgattgagtagccaactggtctactcttttttaatagtttgtataggtatttttatggtaaaattttttacgagtatatttgaacaaattcttgtagagtaggagaaaataatgcgtaaaatatttttactaagaggagcacctggatctggaaaatcttcctttattgctcgtcaccacttgcagccttacgctatttctcgtgatgaaattaggctgctattagctgatttgacggtttattatgaggaaagcacagatcacctgcatcaagttattccacgccacgttactgtacgtacagagcaaatggttgataatttggtacagcataagatggcttatggagaaactatcattgtcgatggaactcatattacgccagataaaattgaacattttcgtccatgggttgaaaagtatcgctatgaattatttgtagtcgatttaatgcaaaataacactttagaaagcttactgcagcgtaatcaggttagaatgcactatgattgggtgaaacctgacgtaattaaaatgatgtatgagcaatataaagctcatccggaagttccatcttgggcttattcaattttgccgaatggaatggaacgggccttaagtcaaaaagaaaagaatttagatcattattcacatgtgatttgtgtaccagataaggtaagaccagaagatttcccacatgtgcatatttccaacttttacttttcttttaatgatgaatttactaagaaatacggaacatatagaaacgttataactttaggtaaaactagagaagaagtaatcgaacaatttaggcttccatattttgtatttaaattccatcataagcactttttaatttctgcatatccaattcgaaatgaaatgttagatcctattcgaaaagtaaagggagtttggtcttattcaactggactatataatattgctgattttgtaaaagaatttccagagaacgaacaccagcatgttcatcaatttaatttaagcaaaattgatcccacccgtttgttacatatttggtagtaaaaaatgagaaggtttttgccttctcatttttgtttggaaaagtttattgttttttcaataactgagattaggtcctaatacattagataaagtataaatttaaggaaggaatatcaaaaaaccatataggtaaactgttgaaaaataacaataataagacatcatttgcgttattatattgaaaattaggtataattgaaacgatgagagagattcagaaaaaaggatagggatgggtatgttttttaataagaaagataacgatagtaaacaacggttcggcattagaaaattaactataggggcctgttccgtattattgtctacattaatcttaggaataggaactcaagagcaaaattcaaaagctcaggctgctactacagaaacttctaacactgccagttcgacagacttagtagataatcatcaaaataaaaatacttacctaagttctagtgaagtaaatgaaacagctactaaagttaatgagaaagaaacttctgctggtaatgagcaacaagactctcaatctgcagtagctcaagacaagcaaagtggggaaaaggttgcagatgtagttactaataatcggtctacagttgaagataaaagttctaataatgcagaatcttcggaaatcactgataacactaagaatacggtaaattctgatagggcagaagttacaaataaagaagctaatacacaaactgattctaaaaaagttacgcaaaagacgtcaggtcaggctgttaatgatgtaaacaaaaatgtagctgaaaccactactgacactaagaatacaaaagtttccagctatactagtaatttagacttggaaaatattcaagaaagtcttgaacagcaagctaaggaaaataatggaaaagcattagatgctaaatcagttacatctttacttagaagttcggatgcagctaatttccaagttttggcagcattaacagaaaatatcgctgaggctgataaaattaaagccaacgcagcagtgacaattccaagtactgacggacgttatactttatatatttcaagaaatacgtggggaaatactacagatggtaatcaaccaactaaggttttactttcaggaaatgttcttagtggtgatactgtaactatttcaatcccaagctatggtattgtcggtgtcaattcgccaactatcgatgctaactatgggagtgcttctctaaaggatatgggtaatgataaggtagttatctataacttcaccacttctggggttattaatccgatcgttacgattcccgctgacaatggatatggtgctaaacccacgccaatgcaaattactcagcctacggttaaggatattacttggacaattaatggagtagaacaaacatcagctgaatttcatatcgatgttaaccctgtatggaatccaaagttttctttaagtaagcctaacccaaattctactgatcaaaatgcattaaaaaagatgattcctaactatgaatctatctatcaactcgcaattaatgaaacgaacggggttgctcctggacaagattatcaaaatagtcttccttatccttcctcaaaaattaatagtgccgttaattatggcaccgtaattacaattccaatgcctaaagggtatgtgctagatgaatctgctacaatgcaattcaataattttggggataaaactaccattacccaggacggtaataacattattattaccgtaccaaaaggttccggtacgcaaaactggaatagtgggggaccctaccaactagtgggttcttataatattccaatgcccaatacagctactacttatacggctgacgctccgattacgattgtgcaaaagcttaataatgacgggagtcgaacgaagacttggactggtccaacagtaagtcaagatttttatggtgcaaatgatcaaattccactaggccaaatgccactttatgctaaagctgcttataatggtaatcagcttttaaataatggtcataaacaaattgttgcttactttggtattactaatgaatcaattgcttcatacaacgattacagtagtaatcttacttttaattttgatgagggactaggtgtaactgaactaaaaacacctactattcctggtacaagtaactataagtacacaattacttacgcagatggtacaacgagtgaaggtcaagtaaatgctggtaacactattacgggaactggagtaattactaacattgtggttagccctgataactttgaaagagatcaaagtacagctgttgatttgccaactaataagtttgcaaatcaaactactcagtcagtgaatgcttttgaagcatatggggctgttccagatacagttaaaccaggcacacaattagttgctaacctgacctttactgggacaatccaacagggaaatataacaaaatatttgaccagcaaaattcaagttgatcaaacagttgtttcatcagctgatttaacttcaagctcaggtatatttggctatcaaagcaacacagcaacagggcaatctaatgtggggtatctttctgtctacgctggcggaggacaaaccaacaatatttatgaaccaattttttactatgttttaccggagtggttctcagtttatgatttttcaaccgactataccaagctacctgattttgtccctaatactaataatggtgttattggtacgccaaagttgtcagtatttactgttccaacagaaatttcgggactctctcgtcaagttgtaaaaattgattactctggtactggctataactttcttgctggccagggtgctaacaatcaaattcaccttaatacgttacctgacggaactaatggtacatatcaagggataatctatattgttagtccaacgacaaaattaacgaacactgcttataatcctaataacacaagcaattttgctcctagtggtattacttttaatccagattgggtacagggaaacacttctaacttgtactatgtcggagctaatggttttaccattaatcaagtcggtggtgctaatactgctagtgttgctcaaggtaatcaaaatgatatattggttgattctggtgtctctgatctttatggctctaatgaaatggaatatgctgttcgtttaattaatggatcaggtactaaattaactaatgttgttgcgatggtgaacttaccacaagcttcagatactagttttgctttccagttaaatggtagaccagtttataatggtgataagacagggtacactttcttgtattctacggaattaggtaatcttaagagtaataacgatcctgatggtactaagcccgatgagaccggatatgttccagcagatcaagtaactgattggtctaagattaagtcaattattattaaaacttcatccttaagtaataatgaccgttccgatcgtttgattttcacaggaatagatcctaacttggtaaatgatgcgggtaagacgggatatattagtactggtttctattccgatactactaagccatttatcagcagtttggcagtttataattcaagtactgtagctaacaaagttaagccagctaatattactattacaggtgaggctaatattaattttaagcttcagtatacagatgaaaatgggcagttgcagacgattaatcttcctgatttaagtactagttataatttggctcaaaacaatacaatgttgactgagcaagaagctatcgaattagctaataaaaatgcagcatcgtctattcctgcaaactatgaaattaagtcagcgactttgcaatctggtggtaaaacttggcaaactgatgcgccggaaggaactcctgtctttggtgggcaagtacaatatttctataataatgctactgtcctcttacaagctgtgccaatccaacgtacacttacttaccaagtaattgatgaaaatgatccatcaaacccagtaactatccagccgaacactgatttattaaacaatggccaagcaattactggtaatcaaggaagtaatgttccacctgatgcaaccactgcatatgatgcagttaagaatgctttagaagctaagggctatgttattagttcaaagagtagtactgtaccaacaatttttggtccggataatactgcattgacaatttatgtaactcataagactataaatgtaagtacaccagatcaatggccaagtacaagtactgatgcagataaggtttcactgtctaaaacaattactcgaactatcacagttgaaggcttaccaacagctgttgaaggtactacccaaacagtaacattcactagaacagcagttgttgatgaagtaacaggtaaagtaataggttatgtagatccaagtgatactagccaaactattactgatggcgataatgcatggactagtgttaataatacttggtcagcatttacccctaaaaatattcccttaggttattcaatcaaatcaattaccgatgccaatggtaactatgcgaatgttacgagcacagatggaaaactaacaggtgtagcacaaactactgttgcaactaatgaaagtgatgttacagtaacgattacttatcaaggtaaccaagtaagtaatacgattacttttattgatactgacgataacaataaacaagttggagaaactattaccattagtggtcgtgttggagaaaccgataacaatcttaatttaactgttccagaaggctatgaactggctaatggagcaagcttaccaacaagttatacttttgaagcaactaacactccaattactattccacttgttcataaacataagactgttggacctaatgacacgtggccaagtacaagtactaatgcagataaagttccactttctgaaacgattactcgcaccattactgtgtcgggacttcctacaaaggttccatctgttgaacaaaatgttaactttactagaacggcaatcgttgatgaagtaacaggtaaagtaattggctatgtagatccaagtgatagtactgagacaattacaaatggtaatgctgcatggacaagtgataatccgacttggagtagctggactaactcaactgttccagaaggctactatattgaaagtgcaaaagttggtaatactgactatcctacagtaataactaatgcaaatggaattattactggattaaatagtgtcgatgtgactccaaagatgagttcgataaccgttaatgtggtttacaacaaggtcaatcttgatttaacgattaaccatgacactattactaatacctacaatggcagtgaacaaccagtttctcctgatataattagtgaaattactcatactgttgtttcatcaaataatgatgtatctattcaaaatattgctcaagctattcaagatgctaacttgacgtcaaatgattattcatacacagatagccaaggtaatgttttaactggcactccaactaacgctggtaattaccgcattattttgaaccaaaatggtttgaataaattaaataaagtagctggcggcttaacaattaactatgatccaagtaaatcatacgttaactacactattgaaaaagcagaagcaagtgctgagctagaaggaaataattctaagcagtatgatggtcaaagtgtaactaatgttgaagttactaaagatggtaagatcaaagttactgcgaatgttccgggcactactcaaagtgcatatcaacttcaagcgggtgactatgactggtatagcgcagatggttcaactagattaagtagtgcaccaactaatgttggaaattacatgattaagttaaacagtacgggaattgccaacattaaagctcattatggcaatagcgacaacattaattggactgatgatgcaattacaggcagtgcaacttatgaaattactaaagctgcagccactatttcactaactcctgataagaacaagcaaacaagtagttggactggaagtgaaatttctataaatccagctgattttgtaccaactcttaccactgataatggtgtgacactcactgttcctgctggtactttagcagttggtgactacacagttactccttcaccagttgcaccaggaacttaccaagtttcattgactaactcaggtattgaaaagattaaaaaggcgatttcaactagtgaaaactatgtttggaataatactggtaatggagtgttagaaattgttaatgctaaagcggactatcaaatgtcaggcagtggtgaaactacttatactggttctgcggtagaattaccaatggatcaacttaaggctgcaatttcttcatctaatacagttagtggtcaagatttagttatccctgagcttgatgttaatgactttacttggtctagcggtactgccccaacgaatgtaggtaattacactatcaagttgagtgaaactggtattaataagattgctgcagcaaatccgaattatgccttaactttaggtacgaatgcctttacttacaagattaatgcggctaaagcaagtgcaactgtaagtggtgagaatagtcgaacatacaatggtaaagctatttcaattaatgatatctataatggtggaactatctctgttaaaattactggacttgacgatcaagaatttacttacaccttgcaaactggtgattacacttggaatgtatctgatccaacaaatgtgggtacttacactttaactttgaatagtactggaattggtcacttacaagatctcttgaacgataagtacggtaacggcaatgtaactattgctaacagccaagttactggaagtgcaaaatatactattgaaaaggctaacgccaatgtaactttatcaggtaatcaagatgaaacttatactgctgaagaattcaccaatagcaacattaaggttagtgactacaaggtgactttgagtaacggattagaatacaagctagttgatggagacttagaattcattccaaatcaaaatccaacaaatgtcggtacttatactgttcaattgtctgatcaaggtaagaagaatattgctgccgttcaaggtaaaaactatgaatatagctttaatgatactggagtaggtagtttcaatattactaaagccacaccaagtgcattatttactggtcaaggggaaaagacttacgatggtacaccaattagtgggtatgtaccaaaggtgacgattacagctccgggcaaaaatgatgtaactttaattgctggcactgattatatttggactaagaatggccaaacatttactactgctccaagtgatgcaggaaattatactgtttcattaactttagacggaattggtaagatcaaagcagtaaacgctgcaaatcttgattggtcaaatgtaataattagtgaaaatgcaaggtacactatcactaaggctcaagctacagttaactttgctcaaccagctagtcaaacagttgaatatgggaagaatgattttgatgtaaataacttcaaaccaagtattttcacaaataatcatgtaactgttaatgtcccagagggggtgagcctttctgcacaagctggcgactttgagtttactaatgccaatggaaatacaacaactaccgttccaactgggctaggaacttacactgttactttaagtgaagctggctttaagaaacttcaatcacagactaataattatgactggataaataatgcaaaaggtacttacatagtaactaaggcaactgatgtgtctgtaaccttaatcggtaatcaagaagtaatttataccggtaatacatttacaaatagtgatattaatgttaacgactatcaagtaactcttgaaaatggtcaaacttacaagttagttgctggcgatttggaatttggtccgagtcaagatccaactaatgcaggagcttacaaggtacaattgtctgcacaaggtaaggaaaatattgctaaggtggattcaactcattatagttacaactttgataatgctggtactggtaattttgaaattcaaaaagctactccaagcattgaatttaaggccaatgctgaaaagatatttgatggcacatcaatagctcttggggactacaagactcagccaagtgtcaccataactgcaccaggtaatccaactattactctggaagcaggcgattatgtttggataaaagatggtgttacttatacaactgcgccaagcaatgttggtagctacactatccaattatctgaatcaggtaagaataagatcttgcaaaatagtaataatacagaaaatcttgattgggctaatgcaaagattagtggtcaaggttcatatataattactgaggctaatgctacagcaaatctttcgggtaattcatctaaaacatatgatggtaatccagtaactacaactgaggttaatagtaaagatggtacagttgaagtaactattaccattccaaacagtagtgaaactgtaacttataagttacaagacggcgactacacttggaatacgctaaatggggatgctccaactgatgcaggtgactatacatttaagctaagcccagaggctcttactaacttgcaaagtgcaattgatggtaaatggggtaaaggtaacgttaagataacagatagcgatcttaacggagaagctactttcacaattaataaggctgatatcactatttcaggaaacagtagtcaaacagggacgtacaccggagatccacaagtagtagatccaagtaatttcccaattacgttaaccccagaaggtgatggtccagttccaacaattccagctggtactttaacaagtagtgattttatagttaaagataaagatggaaagactgtagatccaaccgatgttggagactacacagtttacttaactccagaaggtgttgagaaacttaagaagctcaatccaaactacaactggccaacaactgaagaagaagttggtaagttagtaattaaagctgctcaagcaagtgcaatagtaagcggtgaaaatagtcgtgtctacaatggagaagctattagtaccgctgatctttaccaaggtggagacattaatgttacgatcgttggaattaatgatgataagattacttataccctaaaagctggagattacgattggaatgtatctgatccaactaatgttggtacttatattttgactttgaatagtactggaataagccacttgcaagaaattcttactacaaaatatggtgctggaaacgtaacccttgcaaatactgcagtaagtggcagtgctaagttcacaattactccagcttcaatcattatttcagggaacggcagtcaaacaggaacatacacaggaaatccacaagtagtagatctaagtaatttcccaattacgttaaccccagaaggtgatggtccagttccaacaattccagctggtactttaacaagtagtgattttatagttaaagataaagatggaaagactgtagatccaaccgatgttggagactacacagtttacttaactccagaaggtgttgagaaacttaagaagctcaatccaaactacaactggccaaccacagagcaaaatgttggtactttaactattattccagctgttatggatataactttatcaggtaatggttctaaagtttctgatgggcaaccagcaaaagttgagctttcaacattggtagataacttaactggtaacaatcttaataaagatggtttaacactggatgactttagctggaatactccagatggcaacgctccaagggaagtgggtaactacacgattactttaaacgaaaacgggttgaagaaacttcaagctgataatttaaactacactgttaatgtaagtggtgaatttaagtacactattactgctgctcatcaaaagattgagtatgttgatggtaacggcaatgtcattaagactatcgaaaatattggtacggctttatctaactatggtgataaagttgactttaatgtaaaacaaaatgttccaaaagattacaagttggtagattctaatgtctcaacccaaatcactattgaaaatggtgtaactaaatttttagtcgaacctaatattgtaacaacaactgatactaagacagtaacgagaacaattattgttgaaaacccagatggaagtgagaacaaagttgtacaaactgtaaccttcactcgtcctaagtacactgatccagtaaatggtgaggtaacttacggagaatgggataagagttcaggtaactggaataagtacagtgcaccagagattccaggctacacttcaaatgaagtaccagaagaatcagtaactccagctactgcagacaagacagtaactgtgaagtacagtaagaatccagcaattgaaacaactgatactaagacggtaacgagaacaattattgttgaaaacccagatggaagtgagaacaaagttgtacaaactgtaaccttcactcgtcctaagtacactgatccagtaaatggtgaggtaacttacggagaatgggataagagttcaggtaactggaacaagtacagtgcaccagagattccaggctacacttcaaatgaagtaccagaagaatcagtaactccagctactgagaatcaaattgtaaggattgcttatagcaaactacaagaaccagaaaatcctattactccaactaagaatgagaataataagaaatctgagaaagtatcaccagtaaaatcacaagttttaactaataagacaagtaaaataaagactgtgaatactgtacaaagaactataagaaaacaagtaccaagaagccaggttaagaaaaataatcaaacattgcctcaaacaggtgctcacaaggatatgctcgccattatatctggagcatttgcagtaggaattggattatttggcttaagtactaatcgaaaaaagaaaaaataaaatttgaataatctggatgatttccagaaataataaacgctgttaagtcaaggtttaataaaaacaagatttagcagcgtttttgtttagtaactatgttttagattgacatactgttgggaattaagtagctaaaagtagctgcttaattcctttttattgtattagttaaagttaagtagttatttttaaacaactaatttaggaatgactaaaaaatcctgttggtgaaatagggtaactatttaccaacaggaaagaatatatttattttactagaaattagctttgattctctatagctgattcattccgttcatccgcatcaactactgtttttgatacttgctgatcaggtttatatgggcgcttaatcggcatccccattggattctgtcctttagacatcaatacagtaggaatatttgatgtaactttttcaggctttggtaatccttcaatttcccaagtaaagggagcaaattcgttttttggatttacccaatttggatgctttttagaaagaaggtaaagtcctaaacaggtaagtaatacaactgcaactaaaactgcaataacaattatataagttactggagatccgacttctgccttaacttgtgctggtggataaaaggcaagaacaataccgaaaattgatgaaatgaggccaacaccggcaataatccaagctcctaccttaccaccaggtactttaaatgaacgaggacggttaggttgttggtaacgtaaacgtaagaatgcgacaaacattagaatgtagtagaaaagatatagaacagtgacacactgtgttagtaaaattacaaatccttctacatttggaattaatttgaatagatatgcaataatagtcattccagccatttggacataaactagtcgagcaggcattccatgcttgtttttcttttgtaaccattttggtaaaaagccactaccaccagcttgggcaagcataactgatggagctgctagttcagtcacagtagaagcaactaaattgaaaagtccgacccacattagaactagatacaaccaaggaaaggcaaaggtctcaccaagaactttaaataccgtaactaatgaatataaaacattaatttgtttttctggaacgatcattgcgatgattacagtacctactacgaagattaagaatactaagatcaaagtaataaaaattgaagatacaaaatctttttcagggtgccgtaatcgtttaatgaaggcagcattttcatcaattccagtataagagaagaatacaccagctgcgagggctaaagtactcattccattccattttggaattaattgttttggtgccattgaaatagtgggggtatgtccctggcacaaccaaacgattgttaggataatcattactgctaatgggataagtgttccaattaagacaccatattttgtaatagtggtaaaagttttaacacctttattagcaatgatagccataatccaatataaaataatccatccagtcatgattaaaacaacgtgagtaggattttgagcgaaggcaactgccttgttatacataggcgtgtagaacaaaatggttgcggtggaactcggcatccccatcccgaagttaatcataacttgaaaccataaaatcaacagacaagttaatgcccatccttttcctaaaccttcaccgacccagcggaaaataccgccacggttgctccagccagaggctagctctgcagctactaaggcggtaggaatgaagaagcaaatagcaccgatggcaaaataggtaactgacgataaaccataaaaggcttcttgaacatcattacctaaaccagcgataattgccacgttcattagagttagggtccatatggagataaaggcttgctttttggcagatcctgctttatgagaattctccatttttctctctcctttaaatatatacaataaacaaaatcaatatgttatttattaatctgctcatgtgtatactagtctcatgtttcacaaactacaaataaaaagaattaaatataagagttaaaaacctttataataagctattgtttatctatagccagcctttatttattatattgtgaattaagttactaattatagtgatgtgactatagtaatataatcgtgaaaagaatggctatctacttaggcaagaagaataaaattataaattagtaaaattaaatcaattcttaaaaataacgaattatattatttcattttttatatatttctacttaagtgcttttgattataatgtagtatatagggtatagacttgaaaaatataacattaaatataaaaggatatgtgtagaagaaatatatctttgaaagagtagtattgctcaattcacttatcgaggagaagttcatttggaaaagaaaaatcttttaaatgtaataaagaaagtaagctttagtctattcatagtaataatttatgtaatgggattatacattcctcttccttttgcagaagggactaaacagtatatggaagctgtaaaaaatactcctatttcaattttaggagcatttagtggggccaattttacacggatatctattttttcaatcggtctgaatccattaatgttttcgatgttaattattcagctgctaagttttactcattcctttggttttgatgccttgtcaccgaaacaagtgcagtacttgatgcaatttttaactatgattatcactatcattcaagcagcactattagtctttgcttttacaaatcgacggaatggtttagaagattttgaaatgatcttgatattgagtgctgggtcttgtttagtagtttggctttgttaccgcaatatgaaatatggggttggagcaagtgcaccagttattttaacaagcattcttaatggtgccattcccaatataattagtaatgtaaaacttcttttaaccatgaaatatgcatggatttggttagcagctttagctatttttattttgttactaataaaattttggcttgcgtttactaaagcctactatcctttaaaagtagttaatcctagtcttcctgcctctagtaatttgatgacagtgccgttaggattaaacatggctgccatgatgatgtatatggtaggaatggctattttgacccttcctttaatggtgggaagatactttagttcttcatctttgatcaataattgggtatttcaagcttctttttctgcagtaatgggaatattgattttttatttcttcacttttgtaaatttcgatcctaaagaacaagccaagagttttcgaaataatcactactatattccaaatattgctcctggacgtcctacacaacgatatttaaaccgtctaatatggattattgcctttccgggagccgttttaaatgcatttcaacttgtttttggtttatatgggggtaattttttaggtaattatgctggctttgctattattccaatgaatgttgttatgattacaatgtttatgggaggaattaaagatcaaattgatactattttgttcccatatcgttatgatcgtttattaaaggataactaataatgaaatattttattcctgcatggcataaacaatacgatgactggtcaattaatattccaagtattgaaaactatgacgcagcagaatacatgactgttttaaaaaagtttgacgaagaaattggtctgataattacagactatcagtctcaattgttgagtaaattaaatcaaattgcctttttccctaataccctattttctgtatatgattttttacaaggagttcatggatttgaaaataaggttttagaattagaagattttaactggcctaaaaatgcaatttttgattatggtccttttagaaccttaattgttttagaaaataaactatatgcaacagttttctatgatattgatgggcatattttaaggatctcttatcctgaaaatgacgagcataaagcatttactttgggtatagatagtcgtggttttatctctaatcaagatgatgaggaaaaaactatctactttgatccatacggtaattggcgttttaaaaaggacaaaaccaccgacaaaatcacggttaatccagaaatgcatttttgtaaaagaagagaatatgaaaatattacagatttggttgatgagattttaagtcgatacttaaaggtcaatgctaagaataatgatgaaataattgtaacggtagatgatgagagtagttttaataatgaaatcattgagccatataaacctttatatataatcaatagacaccatccttatagtaaaaaaataggtagcctagctagggcaaaagtaattgtaagtagcaatgaaattaaacaaaatctagaaaaaaattatagagaacagttcgatatttcagttattcccgtctttaattcggaatttcgtcttggtcatagtcaaagacaaaatgtacaggagattggcttctttgcggaaaatgcaaatgacgaaaatattcatcaaattattcaaaagctgtgtaactacatcttaaaaaatccagataattacagcttgaaaatatttacatacaatttttggaaagctgatcatgtgaataaaattcttgagcaaataaaagaagaaaacaaaaacagttttattctcggaaagtcagaacaagcagaaaatgctccaattgatggacttgatgatgaagtgagtttaccagaacttgatgttgcgcatacccgtttaactaatatttcagatgtattaagtaatttggataaaatgagacttttaataaattggggaaaagcggatgaattaatgcaaatatcaggtgtaagtattggaattccacaagtgcaaaacttttcttcggtcactgttgtggataataaaaatggacgaattataaagaaaataagtgagcttttacctgtagttgatgagtatttaactaatttaaatagttggaatcagacagtagtatataacgtacaattaatgaaccagtattccgaagaaaacatcattgagaaatggaaagaagtatttaaagagaggaaagcggagtagaatgcgagttttgcaactaggaaatgataactgggagaaaaaatatacaatcccagaagatatggaatggcattttaacgacttttcttttgaggaaaaaaaggctacgaagaaaaaggggataaaaagttatgatgtaattttagttactggtaaaactaacttaactaatgaccagttgaagaagttaaagcaattgatatccccatatcatgttttatacagttctaatttaaatacagaattggatgatcatgaaaaatattttttgaaaagtattgctgctcaaaaaataaaagaagaaccccagtacttaattgatagacttccaattcgttacttctctggacaatctggattaaggatttttccaagtcaactgaaattaaatgagcacgtggttaagatttatgagtttgaagaacagggtcatcttaaagtaaatctagatacccacaatgaatgggtaaatttaggtacttataaaagtggggtctttatcgatcctgataagcagatcaatttttggctttcattaaagaatttcaattttcaagttagactgagaatttttattcaacaacctggtacagatggagatgtcaaagaacaaagagtaatcgacttaagctcttttaataaagatgaatatttttctcaaattgaagcatctgaacactatcggactgcaaccctaaatctagaagttaaggggagcggcgacttaatcattggcgtgcttcattcacgttggggccgagatggggccggaaatttcattgccggtgggcaaagaatagttaatcctcagactagggatgatattgcctattactttaatcctggcgacctgaagcccccattaaatgtatatttttcaggtgcgcgtgaagcagaaggttttgaggcatatttcttgtttaaagggttaaaagcaccgatgcttttatttactgatatgcgattaaatattggtcaattttatgacgataaggataatttttttgagcaagaaattattaaaacaattaagtcaaaattgaatgaattggggtttgatgaatcgcaactactagtaaatggaatttcaatgggaacatatcctgcgataaaatatggagctaaaatgagtgctcatgcaattaatgttgcaaaacccttggtaaatttgggctatattgcttcaaggactgccttagatcgtcccgacgaatttgaaactatgttcgatattgataaagggatcggtccagctaccgatagagatgacttgaaaaaaattgatgagaatttttggaaagaatttgataagcaagatctttcaaaaacacgcttttttgctggttatatgattaatgatgactatgacgataaagcagtaaaagagttaaaagagtctcctgctgtaaagcaagcagcccagttttctgctaaaggatttcccggacgacataatgatgatccacaagttaactactggtttattgatcgtttaaatgaactattaagagaagattttggtcgagataatgaaaaacgtaattaatcaagtttattgggatagaatgtcagagacatatttatatggaacggcatttaagaaaaacgctaaaaatgaagtcacttttaagaataaattgatgccttcaggaaaaactcttattagctggtcatcaatagcaaattatcaggcagcaaaagaagtccctagtttaccacttcttctgaatggacaagaatatttattaaaaattagtgcaaagattaagccggaaaatagtgcaatttttggaatacatttttttgatattcaggggaatgaaattgataaagttattttcactgatttagaacacaagtttaaatatccacctcgagcagtgaaatacactattgaaataattagtggtggagtagaagagattaattttaaaaaaattcaaatctctcctttggatttagaagaagaagtttttaatgacttttatcctcatcctatttatttaaataaaaattcccaaaaagaagggcttattctacttgatgattctaaacgagctagaattattgctccatttaagattaagagttatgtgggagccaatttaactattggatatctgagttggcaaaataaacaacatggtcttgaactgttgaaagattatattaatgaacataaagataaagaattagtcatctttagcagcagtgctgatatagatgaatccttagcaaattctaacaccttaaactgtatggtagtgtattcgaaggcttttgtagatgaaggatatcataatttgcaggaaacatatatttcaaaaaattatcgagaacctgatcaagttcgaatggtaaaagaagctattaattattttaaggaatgatgcaatgctaacagataggttaagactaaaaaaagccaggaaattattaaataaaattaataaattaggtcctaaaatgcaggcaatgagtgatgaaaaactgcaaggacaaactgctatttttaaaaagcaacttaaagaaggtaaaagtttagatgatattttaccagaagcttatgccactgtaagggaagcagataaaagaattttggggatgttcccctatgatgtacaggttttaggggcaattgtattacataatggctccattgctgaaatgaaaactggggaaggtaaaactttagttgcgacaatggctctttatctaaatgctttagaaggtaaaggcgcaatgttagtgactccaaatggttatcttgcatctcgtgataaaaaagagttagctccagtttatgagtggctaggtttaagtgttagcttagcttttgcagaagagaaagatagtaaaaagaaaataactgctaaaactaaaagaaaatggtataactccgatattgtatatactactgcttcttctttagcttttgattatttgtttaataatcttgccagctccaaagaaaatcaatatttacgcccatttaattatgttattgtcgatgaagtggatgaggttttattagatgaagcacagactccattcgtggtctcctctagtcctaatgttcaatcaaatctatatcatttggcagatcagtttgtaagactattagatcccgaggtggactatgtatttaaaaaggatgatcaattattttggttaacagcccacggtattgaaaaagctgagcaattttttaaactagatagcttattttctaatgagagcaggagtgtttatcgccatattattttagcgatgggtgcgcacttaactatgagacgaggacatgactacttagttgtaaaaggcgaagtggtcttgttagatgaagatagcggtagattaaaacgtggagttcaggtaagtacaggaattcaccaggctgttgaagctaaagaaaaggttgagttgactaaaattcagaaaacagcagcttcaataacatttccagctttatttgcattgtttaataaagtaagtggaatgagtggaactgctaaagttaatgaagaagagtttttacagacctataatttaaaagtggtaactatccctacaagagtgccggtaattagaaaagattatcgcccacttattttcttaactacaatagataaattaatgacagctgtagatgatgtagtagaaatgcataaaactggtcggcctgtgttacttgttgctggttctgtagaaaattcagaaattatttcagaactattactcaatattggtattcctcataatgttttaaatgcctataatgcagcctatgaagcgcaaattattaaaaatgcaggtcaaaaaaatgctgtaactattgcaacaaatatggctggtagaggaactgatattaagctaggacccggagttaaggaactaggtggcttagcagtaattggaactgaaatgttacctaaaagggtggaattgcagctagcggggcgtgctggcagacaaggagatccaggtagcagccaatttctgatttccttagaggattcatttatttcttctaataatactcctcgtcagaagaagtattaccgcaaattaatgaagaagaagtcaaagggaaaggatattactcttctctcaggtccgcgaattcgatttagtttgctcatgctgagaacccgtaaagaagatcttaatgagttgatgagaagtcaaactaataagatggaaataattttatcgcttcaacggaagaatttttatactagaagagacaaaattatgaaaactgatgatttacaggaagatgtagatcggatcatcgataatgcactgaatctttatttagaaaaacaggatttatcaaataagagtgatttaaagtactttattaaccagcatgttacttatcaacaggttaatgtaccagataatttgaaaactaaaaaagcaattaaagactttttgaaagaattagcttacaagattcttgatgagaagaagcatgtattaattaacaaaaaacaagcaaatgatttttaccaacaagtgattatttcatcaatggatggaaattggattgatcaagtagatagaattgaaaaaataaagattaatgcacagcaatggggaagaagtggaagaccgcaagatcttctccaccaagaaaaggcttttgaagcgtataaagatttcttagataaaattaccttgtctacctttgataatcttttattaagcaagatttttacgaatgaaaaaggacaattagttgtagtatttaattagtaggggaaaattatgaccgtatataacataaatttaggaataggttgggctagctctggagtagaatacgctcaaaaatatcgtgatcaaagttttgataaagtgggaattgaacgaaaatttattttttcagatttaattttagggaataatatcggagatttaaccgccaatttgggttttgataatgacaatattatctggttatataacttctttactgatgtaaagagttcaacgtctaattattctttagatactctagaaaacgaactcaatttaaaaaaactaagtagtaatgtaaagactgttggaaaagaagtattttatcaattaaatgatggcttacagctagtagctcgactaagtgatgccgaaaaacgtaccattgatcaggttagctatgttaaaaataatactttacttaagagagacttttattcttacactaagtatgcctgtgagtattatttaggtgcagataaagataatcgggttacctttcgggaattctataatgaagatggcacaattgcttatacacaacatttaaatggtgatcaagaaacatttgaatttgcaaatggtgaagttatttatagtaaagatgacctttatctgaaaatgcttaaggaattgaactttactaaaaaagacgtaattattctagacagagaagatgaagataagaacttaattaatggtcaactagtttttgaaaaccatggaccagctaaattagtggtggtagttcatgctgatcattttgataagcactataccacagatcaaaatatcttatggaataatttttatgaatatcaattccaacatgcgaaatatgtcgatagctttattgtagctacaaatgaacaaaagaagattttaaaaaatcaatttaaaaaatactataatattgaaccgcgtattgattgtattccagtgggaagtttaaatgagttggagcaccctacacaaggaagaatgaagcactccttaattacagcttctcgcttagcaaaagaaaagcacattgattggattgtgaatgcagtagtagcagctaaaaatagtgtccctgatctttctttagatatctatggaactggcggtgaagcagggatgcttactaatttaattaatcaaaatcaagcacaagattatattcatattatgggacaaagagatttaacaaaagtctatcgaaactatcctgcttatattgccgcttcaacaagcgaaggctttggtctctcactgcttgaagctgtgggatctggattagcaatgatcggctttgatgttccttatggaaatcctacttttattgaaaacgagaaaaatggaatgcttttaccatataatgaagaatggactgactttagaaaagaagaagttttaacaaaagcaattatcgagatgtttactaagagtgatgtagacagctttaataaaaaatcatatcaaatagcagaaccttatttaactgcaaatgttgctaaacaatggaaaaaattagtggggggaattggtcaatgattaatttatttgaaaatttagacgtagaatcaaccgactttctaagatcacagctttttgctaatcttaaaattccttctgtggtaattaatgatgatggttttttaccaattgaggtagactctccctttaaattctattgcggatttggtgatgaaaatactcccctgtactttaaccgtctaaaggtgccagaatttcatcgaattgtagcaactgcaagtaagggagaagtctatgatctttatgaaaagagagcagatatttttttccttgctactgataatactagactaattaaagaagttcattggcttgataagaatggtaacttgagctggattgatcactataatcgtcagggaaagctatttgctaaaacttatgttaacaatggacagcaagttttaaagcggtactttaataaagatggaaaagaagttattacacaatatttagtttctggtgatatctttttacatgaagaaaataatgaaagatattttgctaatttagctcaatttgtgacttactatttaagaaaaaagaaataccagcttgatcatattttctataatactttgaatcaatctatgatggtaagtttaggccttcaaaatgatggtagtgatacgttgttttggcatgaaaagattactaacgatctaccaggtaatatgaagtatttaatggacaatagtaccagaactaagcatattgttttccaaaattatgtagattggcaaacgtggaagaataaattaccaaatgataaaaatgttgattttagatttttaggtatgatttatcctcatccaagaggaaacaaaatgcgtcctgaagcagttattttgactaactcagaccagattgaacatttagatgaagtagttcaagcaatgccaaatattcattttaatattgcggctattactgaaatgtcatctaagttattagctttcaaaaagtataacaatgttcgtttataccctaatgccacaactaaacaaattcaggaattgtatcaaactagtgatatttatctagatataaatcatggtaatgaaattttggatgcggttcgtggtgcttttgaacaaaatatgttaattctgggatttgaaaatactttgcacaattctcaatttattagttcagaaaatgtatttaagccgaatgaagttgataagatggcagataagatttcagatgctttatctgatacaaataatatgagagagcttattgatgagcaacgtttacttgctggggatgtaagtgttgaacagtataaagaggttatcggcgatttgagaaatgaataaagaaaagaaaaaatcgacgttagtggaacaacacgcgttgaagcgattagaaaaagtagaagagaaccagagaaaagcttatgaaaaaaagcagaatgattttccctggaaacaaataactatgggattactttttggaataattttacttttgatgttaatccaaatgatagttaaataaaagaaggctagtcttattgtgatttatactttttcaaacaaatagttaaaatataaattaaaaaatcagttcgtcagtattacggactgatttttttctgttcttttttagtttacccttgtcttttacttgttgaataataaaaaacgaataaagttatattatttttgcttttttattaataataaaattttataaataacaattaagaaaaaatattttctattttttctttgatttatcaacctttttcttttatttaattactaaagagttattatagagtatgtaataataacaattgaaatgcttctaataaataaaattaattgtaatattatagtaacgagtaggaaatgttatgaaagacaaaaaatttaagaagaatcaaaaaaataaatatgtcgatcctaatagtttaaaggaatcgggagacagttctaacccatatcttaaagaactagcagctttagcagcaattctgggaactggagctacaggggcagcaattttacctaatgatcgtgtatatgctgcacaaacttctgtagatgctaaatcacaaatagttggatcagtatctgaaagtacgcagactgacttgtcaaaaaagggaaacagtaaatctgatgaaaatggagtcagtactagtaattcagaagctaagagtatgtctacttctagttcaaaaagcttaaggatctctcggagcgcatctacctctttgagtcaatcgcaacagatttcacaatctatgtcattaagtaattcgcagagtctttcggagtctttaagttattctaaaagtaaactaaattcttcaagtaatactcaaaaaaagatatctaattctgagacgcacagtacttttaaatcttcgaagaataaaaaaataagtgaagaaaactctcttacttcaagctcaaatactaacagatctagtaataaaacaaatataagaaatttctattctagtgagacctcctctcttgatagaagtcaaggtccttttcaaagtaatactagtgaaataaatagcttaagtttgagcagtagacagcttataggtgagaattttcaaatccctgtagttattcaaaattctattaacaatagttctgataataaaacacaaactaataataaaaaactacagatagataaattgaatttaactggtgtttttaccaacctacttcaaattaatgatgaaaatgcagtagatgtaagcactagtgctgaatttcaaaatgctcttaataattcaactgtaaacgctattcgcttgacagctaacattgatttaggacagtcaagtatcggaagtattcgaattcctcctcgtaatctgacaattgatggtgctaatcatgaccttaacttaggcaataattgtatttggctcaataattctgcttcacctaagactccacgaaatattaagtctcttaatctagtatcgatgagcgagagcttgagtaattcagtaagcatgagtgaaagcttaagcaactcagtaagcatgagtgaaagtttgagcaactcggtatcaatgagtgggagcttgagcaactcagtaagtatgagcgagagtttaagtaactcagtaagcatgagtgaaagtttgagtaactcggtatccatgagtgaaagcttaagcaactcagtaagcatgagtgaaagtctaagcaactcagtatcaatgagtgggagcttgagcaactcagtaagtatgagcgagagtttaagtaactcagtaagcatgagtgaaagtctaagcaactcagtatcaatgagtgggagcttgagcaactcagtaagtatgagcgagagtttaagtaactcagtaagcatgagtgaaagtctaagcaactcagtatcaatgagtgggagcttgagcaactcagtaagtatgagcgagagtttaagtaactcagtaagcatgagtgaaagtctaagcaactcagtatcaatgagtgggagcttgagcaactcagtaagtatgagcgagagtttaagtaactcagtaagcatgagtgaaagtctaagcaactcagtatcaatgagtgagagcttgagtaactcagtaagcatgagtgaaagcttgagtaactcggtatcaatgagcgaaagcatgagcaactcagtaagcatgagcgagagcttgagcaactcagtaagtatgagcgaaagcatgagcaactcagtaagcatgagcgagagcttgagcaactcagtaagtatgagcgaaagcatgagcaactcagtaagcatgagcgagagcttgagcaactcagtaagtatgagcgaaagcatgagtaactcagtaagtatgagcgaaagcttgagtaactcagtaagtatgagtgaaagcttaagtaactcggtatccatgagcgaaagcatgagtaactcagtaagtatgagcgaaagcttgagtaactcagtaagtatgagtgaaagcttaagtaactcggtatccatgagcgaaagcatgagtaactcagtaagtatgagcgaaagcttgagtaactcagtaagtatgagtgaaagcttaagtaactcggtatccatgagcgaaagcatgagtaactcagtaagtatgagcgaaagcttgagtaactcagtaagtatgagtgaaagcttaagtaactcggtatccatgagcgaaagcatgagtaactcagtaagtatgagcgaaagcttgagtaactcagtaagtatgagtgaaagcttaagtaactcggtatccatgagtgagagtttgagtaactcggtatccatgagtgaaagtctaagcaactcagtgtcaatgagcgaaagcttatctaactcagtaagtatgagtgagagcttaagcaactcagtaagtatgagtgaaagcttgagtaactcagtatcaatgagtgaaagtttaagcaactcggtatcaatgagtgagagcttaagccattcagtaagcatgagtgaaagtctaagtaactcggtatccatgagtgaaagtttgagtaactcagtaagtatgagcgaaagcttaagcaactcagtatcaatgagtgagagtttgagcaactcagtaagcatgagcgaaagcttaagcaactcagtatcgatgagcgagagcttgagtaactcggtatcaatgagtgaaagcttaagcaactcagtatcaatgagcgagagcttgagtaactcggtatcaatgagtgaaagcttaagcaactcagtaagtatgagcgaaagtctgagtaagtcggtatcaatgagtgaaagtatgagtaactcagtatcgatgagcgaaagcttaagtaactcagtaagcatgagtgagagtttgagcaactcagtatcaatgaataagagtcaatctagatcaacaagtacgacaacctcaacgaacagtactaacaataatggctctaaatcaacgccaaataacagtggtactaaatctacttctactgatacgcttcagccacaacataaaaatgctgaatctgtagataaggcagctaagaaagatcaccgtagaggtaaattgcctcaaactggtgcagaatcaaattcaagcttcttgggattaatgatcgctgctttaggtggattgcttggcttcagacgtaagaaacgtaaagatgaagataaagattaatagatcttaaatataataaataaagcctcgacttccttttctggaaactcgaggctttgtttttattaatatgaagaaaagcataaatattaagctataataggtttaaatatgttgtaaccatgtagtaagaaaacaatgagaggacagcacatggaaaaaatctcagtaattatcccggtatataacgatgaaaaatatttagctcaatgcttagatagtgtcttaaggcagacttattctaatctagaaattattttagtagacgatggatctacagatagtacacctgaattatgtgaaaaataccgtgaaaaatatgccaacataagaattttacacaagaaaaatggtggagtaggctcaagccgtaatgctggtcttgaaatggcaactggtgaatatattttgtttgtagatcatgatgatttgctgggtgaaacccatattgaagaactttataagctgttgaaaaagaatgatgcagatattgctgtaggaaattttaatcattttattgaagaaaaaagagcatatgggatttggcttaaagaagatgattactttgaaaagacctacactccagaagaatggtttactgtagaatatgagacagtaccttataatatgtccatcatttttgctgtgccatgggcaaaattatataaaaaatctctttttgaaaatatagtttatcccattaatgctcgcgtagaagatgatctaactacatggaaaatatacttattagcagataaaattgcatacatgaataaagcaatttatacgcaccgtatttttgaaaatagtgtctctgcacaggctaataagactgccgttttccctttagaagctgtggaagaaagaataagtttgttaagtcagctcggttttgatattacaacagaaattgaagcatatcactatcgtctaaatatttgtatcgatacagcattaaaggacggggattacttgaaatatcgtaatgccaagcagaaactggcgatcttgaagaagtataaaaaaatatagtttattaaaaataaaactccctgagaataaataaaattctcagggagttttttagttaattattgtattgagctttcaccacagcatcaactaatgctttcttagtaaagtaaccattacgaattaaactactaaaattattaacgctatcaaccatttgcttgtagtcttcatcattaatttgaaggactttagcttgagcttcatctaaactatcagcaataatacctagatgtttgttttttatagtttcagcttctggagtagtgctatttacgataattggcaagcctgctgctaagtaggtgctaagcttgtaagaagcgtttactttcatatattcagaccaatatggctcttcagaccaaactaaaccaaacccaccggtttgacgtaattcttctaataaaacaggatcatgtttccagcccgtaagttcaacgttgtgttcgggatcgttatttactggatctgaataaacttttaattttacattttgacagtcccatttttttacaaaatcaaatttttctgcattacctgcgaagttaattactttattgttttcaggggtaatgaagtaatttactgttgctggatgatcccaaaaatgttgtaccacataaggtttttcctttaatccgttttcccttaaaaggtcatacattttttttgagggtacaattaaaacatcagccttattatagtagtcaatatattgcggcatcagatagcgattaacttcaaacattagtggaatcacatcatgaataaagatgatttttttaatattaggataaagattgatatggtcaattagtgcttggtcccattcaattgcgatccaactaggagattgaaaaatgacggtatcaccaccgttaagggaggcaataatcccatcaaaacgggtgcttctggcctgtagtggttcttctgtccaatgataaacataaattccaaattcattcatgcctagttgttttgcaaaatctacaaccatattttgggcattctgagctacgctattcatagccattccatttatatttgtaatatgaactgtcatcataaatctccttagaacttcatctttccttaattataagtataagaaagaaaaaatttttttacaacacaggccttatttaatcattgagagtatatttaaaagttagttttaaacatttttaattaagtattagatgtaatttagcgacgtatgtccaatattcggtctacgctcaatattctataataatctgttaaatttataataagaaattatttaaaaagagacaaaataaaaatcattcagtttgctttatgttgcattccgaatgattttttacttctaataattattagctaaagcacccattggatcccaaggaagtaattgaattggatctttactgccttcttcaaaagtcttctttaagtcatcgctaaggtgtttcttgttgataactgcttggtaaacaaatttatcgaaccagctgtcactcattacaaagtaacctttaaatccaggcttttcaccccaagaattttcaatcttccacttagttggcttgccatctactaggtcaacacctgtaataaccattgcgtggtccatcaagctttcgcctgaatcaagcatgtcagctttagacatgtcaaagtcaacatcaaataagtcgtcacgtttatataattcagtatcaagtaaaccagcttgacgttcagagtctttaacaacatttgatccaaaccaaacaacttcaccgtttttaagttgagtgataatcaaatctttcatttcatcaattggtaagttcaagtgacgtacttgacgtccgccttccacatttcctaagtattcaacagaaaatactttatggaaaggcttgtctttagttggtgcattaattgtggaaatgtattcacttaagtcccaaccaacatactttttaaagaagtcttgtggacttaaggcagcatctctatggtagttaccatcatcatctttgtattcaaaatcaaaagttttaggtggaacaccaagagaaatagctaaaatacggtaaacttctttaagcatttcgtttttgcgttcttgaacttcttcttcactctttccatcttgaaccatcttacgtaattcaagaccatcttttctaagaagggtatttagagtgtcatttaaagcacttgaattagttgcattagcagtttctgggtaaactttctttggaacaataccatatttttcaattattccgcaaagcatatcccattgaccaccgtcttgttgtggggttgcaaataggaaggcaactttacgatcacccaagtctttatcggcagtagcaatcacattttcaaagaaccagtttgacttttcaaatttgtcccagaagttagtgtaattttgagataattcaaagtccttaattttgaagttcttttgaattgaatgacgcatagtgtttaaagcactgaacatccagcagcggccagattgtttttggttagcaactttgccagtatcaatttcaattgaaaaagtagggtctaagtcaattttagtttgtagattctgactagctttaaaaataccattttcttgagcagcacgagccgcaattttgttagctttacttgagttaaagtcattttcgaaattattaataagatcgtttgtgatttctttactcataaaatcctccttaattaaaaaaagcttaattatattttagcttaaaataaagagttacgtctagtcatggtatttaaaatttgaatatgatataaataatttttttattagtctaaagctttattaaaaaaatagataaaagagacaattagatgcttctttttgttattctgatcacggaatttggaggaacaatatgaaactcaagaaaaaatatttatttttctcaatagttgggattttaatagtagcggttttaggaatttttggttatgaataccaaaaaattcaatcgacggctaatactatttctactaatcattctttagccagtcgtcagcaattaaaacaaggaaagccattttcaatcttggtattaggtactgatgtgggagccttaggacgaggaactagttatgctggaaatacagataccttggaattaattactgttaatcctaaaaagcatactttaactacaactgctattcctcgagataccttagtaagggttgaaaccaaaaataagatagaatataccaaaattaatgcagcctatgctttaggcggacctagagaaataaaaaagcaggttcatgaattactggatgttcctgttgattattatgccttggttaatatgggtggattagaaaagaccgtaaacgctgttggcggcgttactgttaataatccttttgcttttaagtatgaaggacatacatatcctaagggaaaacagtatttaaatggcagcgaggctttaggctacagtagaatgcgatatgatgatcctgataatgactacggccgtcaaaaacgaggccagcaggtgctacttagtgctctgacaaaagttaataaatcaaaaaatattatgcaaatgaattctttactcgacacagccaaagataatgttcggactgatttacctttagatgatttaatgactctatataagaactatcatggagcattagccgatactcagagtgatcatttacaaggaaaaaatgcgacaattgataattttagttttcaaatagctccaaattgggaaatgcagcgtttgtcagataatacccgtcaagcactaggattaacaaaggttaaagttaataatattcaaactaaaatgaatgatatgcaaactaactggaatggctataataatgtaaattatgttttaccaaataacgctcaagtttatattccagttaataaagtatgataaaaaataaagcacttattggcccaaaaaataagtgttttttcgtatatataagtaggacaagtataataaattaacgtaaaatataggtctaagtgaatgtaagagaggataaaaatgaaaaaacgtggttttgaaatagtatctaaataccgtaatgcaggcctccacctgcctcaacgccaaacaattgcgagtgcgggctatgactttgaatgtgcacaagatatagttttgccatcaatttggtgtatgaactttgttcgaatttttagactaattagaaatggtcatgaattaaatgaacatgatctggaattagctgaaaaagtattgaaaccttttttagtacccactggaattaaggcgtacatgccagaggatgaagtcctaattttagctaatcgctcttctaatacttataagcgaaacgttactttgccaaatgggatcggtgtaattgacagtgactactataataatgaaaaaaacgaaggtgaaatttactttcaattaattaattatggcgttcgtccactaaagatcaaaaagggtgaacgaattggacaaggaatttttatgccttacttaaaggcagataatgatgatccagttcaaagacagcgtcttggaggatttggctcgtctggaacaaggaatgatgactaatggcaaaagttaaaactcgttataagtgtcgtaattgtggatatatttctgcttcctatcttggaagatgtcccaattgtggtgcttggaatcaatttgaagaagagacacaggaaattaaaaaagtatcaactaaggcaactgcaagccgtctgatgactaaaattggaaataatgatccagtaaagttaactgaggtaaaagctgagaaagaaaaaagaattgtgactccttttgaagaattaaatcgagttttaggaggagggattgttccaggatctttagttttaattggaggagatccaggaattggaaaatcaaccttaatgcttcaaattactggcgctttagctaaagaacatagcgtcttatatgtttcaggagaagagtccgcaagtcaaataaagatgcgggcagatcgattaggagtaagcaatagcggaattttgctttatccagaaacaaatatgcagaatattcgtgaccagattgatgaaattaagccagattttttggtaattgattctattcaaacaatgaatgaaccttcacttgattcaatggttggatctgcttctcaagtacgtgaagtaacaagtgaactaatgaaaattgctaaaaatgaacaaataactacttttgttattggccatgtaactaaagaaggagcaattgctgggcctaagattatggaacatatggttgataccgttctttactttgaaggagatgggcaccactcatatcgaattttaagatcagtaaagaatcgttttggtgcagctaatgaaattggaatgtttgagatgaaaaatgaagggttagcagaagtaagtaatccttcagctattttcttagacgaacgcttacctaattcgactggttcctcagttgttgtttcacttgaaggaacgcggcctcttcttgcagatatccaagctttagtaaccccaacagcattcggatatgcaaaaagaacaacttcaggattagattttaatcgagtagcacttttattggcggttttagaaaaaagaggcaacttaatgcttcaaaatcaagatgcttttctaactgcaactggtgggattaaattaaatgaaccagcaattgatcttgcaatttgcatggcggttgcttcaagttacaaaaataaagaaatttcttcgactgattgctttgtaggtgaagttggcttaactggtgaaattagaagagttaatcaaattgaagctagagttaaagaggccgcaaaagtaggctttaagcgaatttttattcctaaaaacaacttaaaccaggagcttaagaataactctgagatcgaagtaattggagtagcaagtttaccacaagctttaaaacttgtttttaactagcagagagattgaacttttgctcgttaaaagttacacttaaatggatgaattttaataaattttgaaagaggcgctttaattttggcaaaacaaaaaatccgcgttcgttacgcaccaagtccaacaggtcacttgcacattggtaacgcacgtactgcattatttaactatctatttgcacgtcacaataaagggacaatggtcttaagaattgaagatacggaccaaaaacgtaacgttgaaggtggttctaagtcccaaatggaaaacttgcactggttaggtattgactgggatgaaggtcctgacaagggtggcgactttggcccttaccgccaatcagagcgtaaagacatttacaataaatatattcaacaattaattgatgaaggtaaagcttactattcatacaagactgaggaagaacttgaagcacaacgtgaagaacaacgtgcaatgggaattgctcctcactacacttatgaatacgaaggcatgactgctgatgaaattaaagaagctcaagcagctgcagaagcaaaaggcttaaagccagttgttcgtatccacattcctgaaaatagaacttatgcttgggaagatatggttaaaggtaaggtatcatttgaatcagatactataggtggtgacttcgttattcaaaaacgtgatggtatgccaacctacaacttcgccgttgtaattgatgaccacctaatggaaattactcacgttcttagaggagacgaccacgtagctaatactcctaagcaattagttgtttatgaagcacttggctgggaaccacctaagtttggtcacatgactttgatcattaactctgaaactggtaaaaagctttctaagcgtgatgaatcagttcttcaatttattgaacaataccgtgaccttggttacttaccagacgcaatgttcaactttattaccttacttggctggtctcctgttggtgaaagtgaaattttttcacaaagagaattgattaagtcatttgatcctaagcgtttgtctaagtcaccagctgcttttgaccaaaagaagcttgaatggattaacaaccaatacgttaagaaggcagaccgtgatcttttattagatcttgctttgaataacttacaagaagcaggtttagttgataaagaaatttcaccagaaaagatggaatgggttcgtcaattagtaaatatttacgctgtacaaatgtcttatactaagcaaattgtagatattgctaagatcttctttgaagaagctccagaattatctgatgcagaaattgaagaaatcaagaaagacgatgctcgtcctgtaattgaagaattcaagaagcaattaaatgctgttcctcgctttactgctgtacaagctatgaacgcaattcaagctactcgtcgtgaaactggggtaaagggtagaaaattatttatgccaattagaattgctgctactcgttcaatggttggacctggtattggtgaagctattgagttaatgggtaaggaaaaagttaacaagcacattgacttaactttaaagcaattaagtgatttaggtctttaattatttaatacagttaaagctacgtgaaagcgtagctttttttgttagaatagttatgaaagaatgtcttaaatgaaagagggatgatcatgaaggtctttaatactttaactcgaaaaaaagaagagtttaagccattagtagctggaaaagtaagcatgtacgtttgtggaccaactgtttataattatattcatattggaaatgcccgcagtgtgattgcatttgatacaattcgtcgatattttgagtatcgaggctatgatgtgaattatgtttctaacttcaccgatgttgacgataagatgattaatgaggcccgtaaagaacatacaactgtcgaaaagcttgctgaacgctatattaaggcttttatggaagataccgaagcattgaatattgagcccgctactcttcatccacgtgcaactcatgaaatcaaagaaattatcgactttgttcaagatttaattgataagggcgttgcatatgaagtggacggggatgtatattaccgtgctagaaaattccctaattatggtcaactaagcgatcaaaatattgctgaacttgaagaaggtgcttctgagcatattaatgaagaagaacaaagcaagaaagaagatccaattgacttcgccttatggaaggctcaaaaagaagaggatgaaattgcttgggattctccatggggaaaggggcgtccaggctggcatattgaatgttcagtaatgtcaactaaatatttaggcgataccattgatattcatggtggtggccaagatttggaatttccacaccatgaaaatgagattgctcaaagtgaagctaagaccggtaaaaaatttgttaattactggatgcacaatggttttgtgacagtaggtaagaaacaagaaaaaatgtcaaaatcactccataactttgtgactgtgcatgatattctaaagcaaattgatccacaagttttacgtttttacatgtctagtgttcaatatcgtcgcccaattaactattctgaagatggcttaaaacaagctgaaactgttcttaaacgctatcaaaatactttgcgtaatcttgatgctagactaaatgatgagaatgagacgcttgaagataatggcttaagagatgatttaacacaagcaaaagctgaatttattgaggccatggatgatgattttaatgttcaaaatgctttgagcattatgtacgatttggctacaactttaaataatcacttgcaaaaagatcaagtggataagccagctttaaagcgtgctaaaaaattattgattgcttggctcgaaatttttggagttagctttaaggaagagcaagctgaaaatgatgatgaaattgaaaaattaattgctcaacgcgatgaagcacgtaaaaataaggattgggctgaaagtgaccgcttaagagatgagttacaggctaaaggcattgtaattgaagatactccacaaggaacgaggtggcaccgtgcttaagccgaagattttaacagaaaaaaatactaatccagatgggttaggtcctcttactttagcttatttaggggatggggtatatgaggtttatatcagacgccacttggttaagggtggaattgtaaaaccacaaatgcttcaacgatatgcaacacattatgtttccgcaaaagctcaagcagcattaattactaaaatgcaagacttagaaatgctagatgaagatgaattagcagccttcaagagaggaagaaatgctaaaagtcatacgcatgcaaaaaacacttcaattaacacttacaagctctcaactggatttgaagcgatgtttggatacttagatttattaggtaaaaaagaacgtgttgatgaacttgcaaaatggtgcattgaccaagtagaacaaggaggactagataattatgagttcaaataatgatgaatttgtatatggacgtcatgctggcattgattttttaaaaacacaggatgctaacttaattaataaagtatttttacaaaatggtgttcaggaagaatttgctaaccaagtttatcaattagcacgtaaaaaaaatctagttgttcaaaatgctcctaaaaataagttggatcaaatggttaaccatgaaaatcaccaaggtttggttttaactgtagctccatttgaatatgctgatttagatgaactcttagataagtttgaccaagaaggaaaagaaccatttatcttaatgcttgattcaattgaagatccccataacctaggttcgatcttaagaacttgtgatgcgactggcgtggatgcagtcattattccaaaaagaagagcaagtggtttaacttctgttgttgccaaaacttcaacgggtgcaattgattatgtgccagtagctcgagttaataacttagttcaaactactaagatgctgaaaaagcgtggttactggatttttggtactgccatggaaggtgaagattatcgtaagtggaatgccaaaggaaagacagtgcttgtgattggtaatgaaggtaagggaatttctccattattgttaaagcaaatggatcaaactttaactattccaatggttggacatgttcaatcattaaatgctagtgttgcaactggtgttttactttacggaatgttcaatagtcgtcatcctgaaaaataattaaagattagaaaaaattgtcatttagttttataaagagctaagtgacaattttttattgcttatagttataaaaacagacacacaataaagtcttgatcattaacaaagtacaattgctctatacctgtgattaataaacattcgttcccttagaatgagattttttcttttttattcttattaccaaatagaaaaggaggaatttccggaatggaaagattgaatgaagtttatttgattcgacgtgtaaaagaagagcaagatatggaagctttgcatgaactagtagagcggtatcggcctttaatcaatggagcgaaactaaattttttcattcgcaattttgatcatgatgactgggaacaagaagcattaatcatgtgttatcaaagttgctgtacctacgatgagaaatgagcaaatagttttggggcgtattatcggacaaaattttataatcatctccgatcactcttaaggtatgaattagcacagaaaagaacgtcttttactaaggctatttcctatgacaatgtggtgcataaaaatttgattaaagaagaagttgaagagatgcacatcacacctagaaaggaaatgtatcaaaaatttattaacaagttgtcagaaaaagaggtaattgcgctcaaagtttttctgggagagttaacgattgaagaagcgagtaaggagacaaactatagtcgttatcaattacttcaagcgaaagctcgatgtaaggcaaaaatgcggaaagaattgttttaaattcgcatagaacgaataaaaagactataataggttttgtagaatttatttaggaggtaattttaagatggcagatgaagttattaagacagaattgttagaccgtcacatgaaggaagtttttgattggagcgattctgacatgcctgttagagacgcactatgggactactttatggaaaagaatggtagagataccatgaagacggaaagtgacatgcttccgttcttgaaagactctgacgataagatcgaagccttcgtcaacgaaaatcttaagaagtaacatcacctaaaaacaataattctacgcacagtggtcacgcattgtttgaccaccaaagaacaatctctagggattgttctttttttgtgagaaaatatattttaaaagaaaggggcggcttatggactatataattgggatggatatcggaacaacagcaagtaagggtgtattgtatcgaggaaatggtaaaaagattgaagaattatcaattccttaccctttaattcaagaacaagtagatcaggctgaagaagatccacaagtaatatttaatgctgttcaaaagattatttttgacttaagtaaaagagttgcaggaaaaattaaagcaatttcttggtcgagtcaaatgcatagtttaatcggcattggaaaagacaatcgagtactgactaacagtattacttgggcagataatcgaagtagccagcttgtggctcaagcaaaagaaaatggtcttgcgcaagatatttatcaacagacagggatgccgcctcatccaatggctcctgtgtataaattactgtggattaaagaagaaaatcctaaactttttgcacaggtgcaaaaatggattggaattaaagaatatattatttggcgtttaactggcacgatagtgaccgatacaacgatggcagctggaactggcttgcttaatctccacactttaacttgggataggaaattacttgataaaattgaactagatccagaaaaattgcccaacttagctaaaccagaatatgtggttggaaaagtagaagcagaatatgtacaaaaattgggtttaaattctgaaacaaaaattattttaggagctagtgatggatatttatcaacaattggtgttggtgttttagataaaaaatactttgcactaaatgttggtacatcaggggctgtaagagcaattgcacctaaagcaatagttgactcaaaaaatcgcttcttttgttatccagtcgataaaagtcattatcttcttggtggcccagtaaataatgggggaatcgtctttgagtgggctagaaaaacgatttttgggcccgatcaaactgcagaagattttattaatgttgctgaaactgttcctgcaggcagtaatggcttaatttttcatccctacttagggggagaacgagcaccaatttggaatgctcaagctcgcggatcttttattggattaagtcgaaaccacactaaaccgcaaatggcgcggagtgttttagaaggtattgtctttaatcttttaggtgcagctagaggcttacgcgaaaaaataggggaaccagaagcattaagagtcactggcggctttgtaagaagtgattttgtaaggcagttaattgctgatatttttaatttaccagcagtggtaattaaaaatgatcaaagtggaactttagcagccatgtttctagcacaattaggcttgaatgaagaggatagcttagacaaaatagtgaaagaaatagatgacagtaaagtatattttccaaatcaaaaaaatgtgcaggtctaccaggatataattccgatctatcgagaagtagaacatgatttagaccaaagctatgacaaaatagctcaatttcagaaaaaatatcctaaattatttgaataataaaaaggtaaattgtatcaaattagtacaatttaccttttttctaatataaatatgaatttgacttattttagaattcctaaaatatcactaacaatttgatcaggcattaaatgatcacgcttgtagatagattcttttggttcattatcagtgtattcctttttagcaccataattcttaaccatcatcttagttggaccatagtagctagcaatcttttgaccaaaaccaccatcaatactgttgtcttctagagtaacaactaattcatggtcgttttgaagtttatctaatgcgtcataatcaaggtgagcagcagattttggattgatcaaagtggcattaatgttttctgtctttaataaatcaactaccttttcacctaattgataaaagtcacctaaaccaatgatggcaaccttagaaccgggctttacatcatacttaatagttgaatagtcttcatccactggttcaccttctggaattggatttactggagatttaattgctatgggatgctttctttgcttaactgcccattcaagcattgattttaattcattcaaggtggtaggagctaagtattcccagtttggccaatttgcgaccatggcgttgtcaaaaatacctaagtgggtcttagaagtgccagtaattccgccgccagctaccaccattacgactggtaagtcgttagctgctacatcgtgagaaagttgatcataagcacgttgtaagaaagtggagttttcaaataagactggggtaattccttctttaacagcccctgcagcaaaggcaacagactcttgttcagcaattcctacatccttataattcttagggtatttattcttaatctcacctaaaccaaagacgccagggatagcagcattgatggctaagatgttttcttgattttcaatatgtttctttaagaaatccaaaactacagtagttggattaggagtctttggagctggtacagttgtcttgtccgtcttaagatcaaaaggcaatacccagtggtgactagcttcattttcaatagctggctcatatcccttacccttaagggtattgatatgtaaaacaattgggtggtcaatatctttaattgatttgaaggcatcaatcattgctttaagatcatttccctgatcaacatatttataatctagtcccattgcagtaaatggattatcagctgtttgaccatttgattcacgtaatttcttcaaagcagttacaacaccgccgacattatcatcaatcgacatttgattgtcatttactacaataattagattatgcttttcatcagccgcattattaaagccctcaaaggctaagccaccagttaaagaaccatccccaataagagccgtaatattttcatgttctcctagcatatcacgcgctctagccattccagttgctaaagcaattgaagttgaagtatgaccaacagcaaagtagtcatatggactttcctcaggattagaataaggagttacatcctcgtacttatcgggatcaagccaaccataagcacgtccagttaacatcttgtgtggataagtttggtgagaaacatcccaaacaatcttatctttaggtgcatcgaaaacataatggtaggcaattgtagcttcgacaattcctaagtcaggtcctaagtggccacctttagcagcatctttttctaggatcaaggttctaatttcactagctagttgttctagttcttttagatctaattttttaagatcttttggacttttaatcttgtttaataaaaattctggatgtttgttcatattttttcaccccaccattaataaaaaaagcttactcatttattgtaagtcaatgagtaagcttttactaatattaagttagcatagataagtataagattaatctatactttcttctaatggttgagatgcattttgctttttgagagtaaggaacaaagcaacaaaactgagcgcaaaagcagttgcgttgattgcccaaccgaagttgtaagaaccagtagtatcaaataaaagaccgttcaagtaaacagatgcagacattgcaaatgcaccagtcatattaattactgaaagaattgtactgtagtccttagctccgaattcttctcgaataaggtaaggaagagcaactaaacacacaccttgacccaaacctaaaataaaggcagaggcaataagtggaagactagtcttaaagaaaatttcgccgctccagcctaataagccaaataaagaataaataaataaagtagctcgtgtattaaaacgatcaagcataaaaccaatagaaatcttaccagctgctgctccaagcattaccccagaaactactgatgcaccaattgttaatgggagaccttggctggtaatatgacctgaaatatgttgcacagatccagaaacaaattgcagtgcaagcattgcaaatgctaaagcataaaagacaggggtcttaagagctgccttaagggtaataccactagtttcaagaactttttctggtatatttttcactttgccgtatgcttggtgtttttgattaggtttttctcttaagaagaatgctgaaggaactaaaattccgagaattagtaatccttcgcagatgaagccacctctccatccaaagttggtaatgatgttaccaataattgggttaaagatggtgccaccaaaggctgaaactccaagggcaattcccatcacagttcctaatttttcattgaaccagtttcctaataggacagggatggataaagtaatagcaattggttggcaaatcccaatgatgatccaagcaatataaaaatgagttaaactttgtgctactgataagctaagcatggaaactccaattacagcaaaacagaaagttaaaagccaacgcaagttaagtttggtcataattttacctgcaaatagcaaagtaattgcggcagcagcattttgcaaggttgtcattaaagcaacgcttgctcgaccaacatggaagcttttgctaattggttcaaagaataaaccaatagtattaacaattaatccaaatcctactaatgaaattaaacaggaggcaataaaaacccaccaggcaaaaaaatgcgaattttcttttttcttagtcacttcttttcctactttctagaattataatccaaaaaaagattatagcgaattagtaaagaatagggaaagaaaagagacgctcttaacattctcttaattaatagcttctttttaataaaatatctgttagcttttcaagttgctggcgagttttgttgtctggccaatgtttttgcaagttgtgtaaagctttatcagtgaatttatcagctaacttttgtgctcgctttaccccgtcaagatcattaaccattttttctatctcttgtagttgttccttagtcaaatcttgtcctaatttaactaatttatgtaaacgccccgtatgatcattttgtaaggcaaaaattaaggggcctgagtagataccatctttaacatctaataagactggctttttaaaagtagaactagtagttgtatagtctaaaatatcatctcttagctgaaaagcttggcccaagtagtcaccaaactttttagcttttagagccttagttactttaagaccactctcataagcgccaataaaacaggctaggccaaataagacaccagttttacccttaatttgatctaagtattccttttcagaaatattaatcttgtatgcattgttatactgctcggtttcgccgactaggatattttgcatggtttttccatctgcaataacgctgtgtaagctttgagcattttcacttaaaagagtgagtgataaagcaaataaatagtcgccagcataaactgcgatatgtttaccatattttgtttgaattgaaggtctgccatggcgcatgctcgattcatcgataatatcatcgtgaattaaggtagcattatggagagtctcaattgaggttgctattttttgtagttctttgcgcttttcatgaccatttggcccaaaagagccaaagagcattacacaagcaggacgcagcattttcccaggagaagcaaaagtatcttttaaggcgtctcctagtagaccgggaacagtatttacatgttttaagataatacgattgatggcaatcatatctttttgagtttctggaaaattgtcccaaaaagtgaaattgctcttgttattgtttagtttttcgggaagtgaattttgtagtggataagttgaattttctgccatgataaatatttaattaaaaggaaaagttgctccttttaattaataaatcctcccaatcagttgaatatcagcataagagcagttaaaattaaacggaaataaagttaatgaagtaaaattgttattttttatttcattttcaattttgaagatagctttatttttaattaaaaaagatcttataagtataattctacactatctattaatattatttaaaaggagatataattttttgatgagtaaattagattcttctttactttattgataggaattgctaaaaaaagatttttttgctaagataaatgcagtttaggagtggttttatggcagtaaagaaagcagctcttgcatgtactgtatgtggttctcgcaattattctattgcagcaagcaagaatagaacgcaaagacttgaacttaagaagttttgcaagcattgcggaaagcaaactttgcacaaggaaacgaggtaggtaagcaatgtttaagtttattaagagtgttaaccaaactatggcaaaagtatcatggcctacatggaaacaaaatagacgtgatacaggtgttgtaatcatcagctcaattttgtttggtgcttaccttggtttgctagatttattatttagctacttaacgcaaatgttcttataaaaacagtatatgtgttataattaaatcagttaaaaaagcctccctcggaggtttttttatttgcataaaggtattattttaaggagtttagaaacatggttgaaaccagcgaaaagaaatggtacgttttacacacttattctggctacgaagaaaaggttaagaaagatttactttcaagagcccaatcaatgggtatgcaaaattatatctttcgagtaattgttcctgaagaacaaaagactgaaactgttcgtggtaagaagcaagaagtagatgaaaaggtatttccaggttacgttttagtagaaatggtaatgactgatgaaagttggtatgttgtcagaaatacgccaaacgttactggatttgttggcagtcacggtggtggatcaaagccatctcctttatacgatgacgaaattgaaagaattcttgcttctcaaggccaaccagctaaagaacctaaagctgactatgaagttggtgaaacagtaactattattgatggtgcatttagtggcatgagtggtaagattactgaaattaacccagaaaaagataaactttatgtttctattgatatgttcggcagagaaacaaatgctgaacttgactataaccaagtaaaagaatttgaccaataataaaattttaattagctattgtcaatttaataaattgctggtagtatattagagtatctttattattgtgggaggagaagaaggaaaattctccactataaccgcatcacggaatcaaggaggtattgaccgtggcaaagaaagttattaacgtagttaaactgcaaattcctgctggtgcagcaactcctgcacctccagttggtcctgcattgggtcaagctggaatcaacatcgttggtttcactaaggacttcaacgcacgtactgctgatcaaaagggtatgattatccctgtagttattactgtatatgaagatcgttcattcgaattcattactaagactccaccagctgctgttcttttgaagaaggctgctaaagtggacaagggttctggtgaacctaacactaagaaggttgctaaggtaactaaggaccaagttaaggaaattgccgaaaccaagatgaaagatctaaacgctgcagatattgaagctgctatgcgcatgattgaaggtactgctagaagcatgggcttcactgtagaagactagtgtttttaggaacgtcggatcgttaatcaaaattaacgaatcaaggtgggagagtgtgagaagactcgtttgaccacattttcaggaggatttttacatggcaaagcatggaaagagatatttagaagcagctaaaaaagttgattcaactaaattttattcagtagatgaagctatgaagttagcaaaagaaacttcatacgcaaactttgacgcaactattgaagttgcatataacttaaacgttgaccctaagcaagcagatcaacaaattagaggtgcattggtacttccaaacggtactggtaaatctaagaaggttgttgtttttgctgaaggtccacaagctgaccaagctaaagaagcaggtgctgacgaagttggttctgatgatttagtagaaaaagttcaaaacggttacttagactttgacgtagttattgctactccaatgatgatggctaaggttggtcgtttaggtcgtatcttaggacctaaaggcttaatgccaaaccctaagactggtactgttactatggacgttgctaaagctgttgaaaaccaaaaagcaggtcaagttgaataccgtgttgataagcaaggtttaatccatgcaccaatcggtaaggcttcatttgacgctgaaaaattagcacaaaactttgatgcattacgtgacgttattcttcgtgcacgtcctgcatcaactaagggtcaatacgttaagagtgttgccgtttctgcaacctttggccctggtatccacttggatccattaaacttagactaattaatagttgtttaattaagcaaaaagacttcacaattgtgaagtctttttttgtactaaggttgaaagtgtaatgagattttagttaaaattaaacaatacgctatttttagaacaggaggtgaaggggatgctaaattatatttttagtattttgccttcattattttccggtgcttggttaactattgagatctttttttggacgacagtagtttctattccgctaggtttattagttgcctttggtttacattcaaaattgaagttagttaaagctattttaaaattttatgtatggattattcgtggtacaccgcttttactacaattaatttttattttttatggtttaccaactgttggaattgtctttccaagatacgaggctgccttagtcgcatttattatcaattatgctgcttactttgcagaaatcttccgtggtggactgcaagcagtacctgtcggccaatttgaagcagcacaagtgctaggcttaagtagatggcaaacaattaatcgtattgtacgtccacaggttgttaaaattgttttgccttcaattggtaatgagctgataaacttagttaaggactccagtttggtctatgtaattggtttaggagaccttttacgtgccggaaatgttgcgactgcaagagacgtgtctttagttccactagtattagtagggtgtgtatatttggcaatgacagcagttttaacagctttattgagagtagtggagaagagaagcaatgtctggaaataaagttttagaactcaagaatataagtaaaagttttggcacaagaaaaattattgataagttgaatttgtcactagatcaaggagatatcttaagtattattggcccttcaggtgcaggaaaaactacactgcttcgcttgattgcaggacttgaaagtgccgatagtggaaaattcctccataatggaaaagaatttgatccaacagatcgtaataatcatttagtagggatggtttttcaagattacaatctttttccaaacctttcagtaatggataatattacgcttgctccaattatggtaaataagatgagtaaagcagaggctgaaaaagcagctgcgcctgttttagatcaattagacttagacaagtttaaaactttatatccatatcaattatcaggaggacaaaagcagcgtgtagccattgccagagccctgcaaatgaaacctgaaatcttgtgctatgatgagcctacctctgccttagaccctgagttagtagggaaagtaaaagatattttcttaaagcttaaacaaacaggaatgacgcaggtaattattactcatgatcaccagtttggaaaagctgttgctgataaaatcttaaaagttgagccaatagaaaaatgatgaaaaaaataatacgatttttgggtctattgatcattgtgctagcttctgttggtgtggttggatgtcaaagacaggaaaactcatggcaggcgattaaatcacgtggtactttagtaattggtgttgacgacagcttcgtaccaatggattttcgccaaaagaatggtaagcttgttggttttgatgttgacttagccaaggccgtttgcaaggagattggtttaaagcctgattttcagacaattgattggtcaatgaaagaaacagaacttcgcaatgggacaatagatgttatctggaatgggtatactaagacgaaggctagggcaaagaaagtagcattttcaaaaccatatcttgaaaatgatcagattctggttacacgaaaaaatgaagggataaataattatcgacaaatgaaagggaagattcttggagttcaaacaggatcttcaggagccgatgatttggataattatcctaaagtcttaaagaaacgtgtcaaaagtacagttttgtatgatacttataacaatgcctttatcgatctaaaagctggcagaattgatggcttattaattgatggggtatatgcaaattattatttagctcatagcaagtatcaaaaagaatttaaaaaagaaaaattaccatatccaagtgaaaaattttcagtaggaatcaataaaaaagataaaactcttaaaaacaagattaatcaagctcttgatcatctagagaagacaggagagctaaaaaagattcgcgaaaaatggtttaattaaaaaaagctattgacgacttatctaatttaaggtaatatattgtacagtaaattctacctaagactcgggtggctaacgtgccttaatatcccgccgaggccagaaaaacaaagagttttacaactccatgtctttttggcatggagtttttatttcggctgatagaatttatcttaaagtaaatttggaggtgaattcgttgagtaaagcaatcattgctaaaaaagaaaagcttgttgatgactttgcagcagaacttaaggaagctaaggctatcttagtaattgactacttaggtttaactgttgaagaagtaactaacttacgtaaggatctacgtgatgctaacgttaagatgaaagttatcaagaacacttacttaaagcgtgctgctgaaaaggctggtattgaaggtttagaagatacttttgttggtcctactgctgttgtttacactgctgatgcagaagacatcactgaaccagctcgtattgtttctaaatacgaagatgatatcgacgcattatcaattaaaggtggtatgctcgaaggtaaggttgccagccaagaagaaatcaagaaacttgcagctattccaggtcgcgaaggtttactttcaatgcttgtatctgtattacaagctccagttcgcaactttgcatacgctgttaaggctgtcgctgattcaaaagacgaataatattagtaaatttacacatatctaatttcggaggaaacttataatggctttagatactgaaaagattattgaagatttaaaaggtgcttcaatccttgaattaaacgacttagtaaaggctattgaagacgaatttggtgtttcagctgctgctccagttgctgctgcaggtgctgcaggcgcaggtgcagaaaagactgaatttgacgttgaattgactgatgttggtcaagaaaaagttaaggttatcaaggttgttcgtgacatcactggtcttggccttaaggattctaaggaccttgttgatggtgctcctaagaacgttaaggaaggcgtttctgaagacgaagctaacgacatcaaagctaagcttgaagaagttggcgcaactgttactgttaagtaataacgtcttaactgaacatcctactgaaaatgaggactctattttacggagtcctcatttttgtttacaataaaattatgtttaagaaaaatttttataaatggtttaaagctgctttagctattatttcaattattctgcttgtgttagattttgcggcaataattgatattaatagtaggaatagtaagtggttttggctaaataaccttattttaattattttggcaatagattacttttctcggctctatcttgcaaaaaataagaaagtattttttagaaataatatttttgagctactagcaattattcctgttggtcttgcctttagttggatgaaactggctcagttgggagatattggtttatattttaggctattacgtttaatccggttggctgggctggtgggaatgctcaaagatatattacatactcatggtattttatatgtaatatactttagtattgcctttttgatgttaggatcagttgcaatttcgattaccgagcatgtttcacttgatcaagcattctggtgggcagtaactactgcaagtactgtcggttatggagatatttctaaacacacgatttcaccacaatctttactgggaaaattagtgattttagcgatgattctgattggagtaggggtgatgggaatcgttacgagttctcttactgcttatctgatgagaagaaatgaggggaaaattagtattaaagacaagaatgctgatttgaccttaattttagataaattagaccggctagaagatcaaaataaaatgttggctgagcaaaatcaaaacttacaaaaacaaatccaagaactaaaagaaaatcgtcctcctagagagtgggataaacttaaggaatggattgaaaagaaaaaagacaaaaattaaagcgtaaattcattttcgaatttacgcttttttacatcttcaaataaaaatgtagaataatcatgaatagaagataacaaccagcaataataatgataacccaaccggctgttaaccaaaatcttgcccaggtttgtctatttgttgaaagaacacgaccaaaaactgcttgattgccttttattctaaatcctacccataaacagataattccaataataattgctaaaataaatataggaatagaaatcatcattctatctcttcctttctgtaacattctaattataaggctttatggaaaaaaacaaagcagaattgataaactataaatagaaattaaagaagcgagaataattatgacaaaaaagaatcaaatgtattttgcggctaatcctgatgccaagcatgatgaacacttagttgattatcatattgatgatattgatttaaaatttacaactgacgcaggtgttttttcaaaattaagagttgattatggttccggcgttttaataaaggcaatgaaaaacgttgattttccaaaggatggaatcttagatgttgggactggttacggtccgatgggattatttgcggctaagttttggcctgatcaagaagttgatatggtagatgtaaatgagcgtgccttagacttagctaaaagaaatgcacagtttaatcggattgataatgtaaatatttatcagtcagatatttatgaacaggtggataaaaaatacgggctaattattactaatccaccaattcgtgctggtaaaaaggtagtcgaccaaattttggctgacgcaaaagaccatctagtagaaaaaggcgtcttattggtagtaattcagaagaaacaaggtgcacctagtgccaagaaattaatgacaaagatatacggaaattgtgagattctagctcgtgataagggttactacattttaatgagtacaaataattaaaaaaataacaataaaggtttataatgaaagcgaatacaaagtagagaaaaatactttgaaagaagtgaattcattatgaaactgtttattaacattattttagtcttgattgttttagctggtcttggtggaatgatttatttatcgattgatggtgatcgtttcttaggcgcagctgggttagcgatgctttatttcattggatcaatcggctattttgttaactgttatacgattaaaaaacgtggtcgtatttagatagaaagggtcaaaagatcttttttattttcaagttttaatctatacgtgaatatgttttatgatgaatttatttatttaagctggttaatttagccagcttttttagttataaagggtattatatttacaaatactagtacttataagtttaaacataggaatagatgatgatataaaaataagagaagctcttcgaaaagaaagattggctcaacataaaacacaagccgcttggattaaaaatatacctatgtctgtttctcactattcagaaatagagacaggttatgctaaaaatggaaaagaagcagatattgatagtgaaaaattaattttacttcttaaatctaatcatgtagatataataagattttttgagtcagtcaatggctcgtacaaaattgatgaacgtgcaaggatgatagaggatatttctaatcaattatcaattgcttttaataataatgatttagaaagagtcgagaaaattactcatgaattggaaaatatgcctgctgttccaaaaattacatattatcgggctgtattaatcagggcttatttaaaggacgaaatgacttcaatggataaggcaactcgagcaaaaattaatcaatatatttatcaaaaagataattgggttacagataacgaggcattaacaatttttggtaactctatgcctatttctgatccaggcattttgatggctagaatgggaaaggtattacgctactataaaaatttagaaaattgtccagctacttttcaacggagagtatccacagtttgtgttaattatttatacacggcgctttgtattagaaaaattgataaatatgtgtcagaaacaatggctcttattcgtacattgccttttgatgataggtttggattaaagattcttattactcaatattttgaagatatgagaaatggagataaaaaatctatgcagcaattaaaagatgtgttgagacatgcaggtctaacgaaacttgcaaatcgattacagaatgaaagctgatataaaaataattcgaaatatcgaaatttaattgctgatgacggtactttcttagtaacatataatcaatctaaaataattaatcgataagtttagtgtaaggagagtaaatatgaagaaatttaaaataggagttatttcatttctgactgtactggtaatagcacttattggagttttgactgttcatacgtctgctaccgatcgtttaaatccgttggttagcgaaacagttagttatgctaaggttccaaaaagcactcagaattacaaacaagtaacgatcattaacccaaaggatagtaaaactagagcttataaaataaaacaagtaggtggttatgatccaaatcaggaatatattaagatccatcataagggtcaatatgtaaaatcaatttcatatattacaaaaaaacaattctataaccaacaataaaaatttttagctagcaggtcgctagcttttttctttttgttagaatataagcagaaattaaagaggaagatatatgttaactaaagagcaaaaagaaaaatacatgcacctagcctttgaacaggcaaaaaaggctgaagaacaaggtgaagtgccaattggtgcagttgttgtggataaagatggcaatgtgattggcgaaggatataatagacgcgagcttgatgaagatgcgacgcagcatgccgaaatgattgcaattagacaagcttgtaaaaatttaaattcctggcgcctagtcgactgcagtttatttattacgcttgaaccatgtccaatgtgcagcggggccatcattaattcaagattagctgaagtttattatggtgcttttgatccaaaagctggagcagcaagcagtgtcattgacttatttaaggtagaaaaatttaatcaccatcctaaaatttatggcggtttatttagggatcaagcagcccaaatgctaaaagattttttccgtgaaattagacgtaaacaaaagcaagataaatagtggaaaaataaatcaaaatactgtattatagtttgtgggcaatgtccgacctccaaattgtgtcaggaccggaaggtagcagcactaaggttgcttgggcatgtgcctttttttgagaatttaaacagctcttagctcgtttgagctaggagtttttttgataaaggaagtgcaaaatggcttatcaagcgctatatcgtaaatggcgtccgcgaacttttgatggagtcgtaggacaaacagcgattactgatacattaaaaaatgcaatcaagcgtggcaagatatcacatgcttttctattcgcaggaccacgtggtactggtaaaacatcatgtgctaaaatttttgccaaggccttaaattgtactaatctgcaagatggagaaccatgtaatgaatgtgaaaactgtcttgcagcagatcaaggaacaatgaacgatatcattgaaatcgatgccgcctctaacaatggtgttgatgaaattcgtgatatcagagataaagtaaaatatgccccaacacagggtaaatataaagtctacatcatcgatgaggttcatatgctttcgatgggtgccttcaatgccttacttaagacactggaagagccgccggagcatgtagtctttatcttagctacaacagagcttcaaaaggttccagcaactattatttctagaactcagcgctacaacttcaagcggattgatcaacacgatttaatcgctcgcatgacctatattcttggccaagaaaaaattgactttgaagaaaaggcccttgaagtaattgctcaagtagctgatggtggaatgcgtgacagtttaagtatcttggatcagattttatcttatgatcaagataaggttaaatacgaagatgctttaagaataactggttatgcagctcaagaaaaaattgaacaagtattattaaatttacttaatggcaaaacttcagcagctcttgaaatagttcatgcacttttgcaggacggagcatcaactaagaatattttagatgagttgattagtttaactgttaaagggatgctggcaattaagagtaataaggaagaaacttttttaactgagaattatgcttccgaattagctaaaattccagaagaaaaattctactcactcgtgcaagcggctaataaggccttaaatgacttgcgctacactaaccagcaacaaatcccgcttgatgtatttgtagttcaagtaactcaagctccagtaaaagctgatagtacacctcaacaagctgaagcaatttcgtcagatgttgttcaaactctaaaaaatcaaattgacactttaagcaagcaagttgcggaattgaaaaatagaccggtacctgctagaagtactacttcagacttttctggcacaattaaaactgaaactaagtcgcaaattaggcagcgtaatgaacaagaaaataaaccagaacaaaagccaaaaagaagaaaagctagttctaataaccaagcggctcaagaaaataaccgccggcaggtatatcatgtgcttgaaaatgccactaaggaagacctaaatacagtaaaagatatttggccagacttactgtctactctaaaagtatctcaaagagctgtaatggaagttttagatcctgtggctgcaagtcacgagcaaattgttttaaaatgtaagtatgaattatggtttgagcgagcaaatcaagatggagatctaatttctcaacttgaagctgaaattgcgaagctaacaaagcataattatagtattgttttagttgcagattcttcatggttgaaagtacgtcatgattttgtggcaagtcataaggaagagctacttgctaaaaaatttcaaagactagaaaaatctgaacaagaagcaaatggtaatcagatagatcctcaagcaaaaaaagaagtcattgataaggctaaagaattgtttggagatctagcacaagttaaagattaaggagagaaaaaagatgggtaagagacctaattttggtggtatgggcatgggtaacatgcaaggtttaattaagcaagctaagaagatgcaacaacaaatggaagctgaacaagcaaacttagctactcaagaatttgttggtaaggctgctgatgacatggtagtggctacttttagcggcgaccgcaagctaaaagacttgaagattaataaagaagcaatcgatccagatgatccagatatgcttcaagatcttgttatcgatgctgtaaacaagggaatcaaggcagtagatgatgctactcaagcatcaatgggcaaatacactaaaggtttgatgtaagatgcaatatccattaccaattgcccgtttaattgataattacatgaagctgcctggtattggtgaaaaaacagcaactcgcttagccttttacacaatggacatgccagaacaggacgtggaagacttttctaagtcattaatgcaggtaaaagaaaatcttcattcttgttctatttgtggaaatattactgaaagtgatccatgtgaaatttgccgcgattcaaaccgtgaccgctcaacgataatggtagttgagcaaccaaaagatgtcatggcttttgaggaaatgggcgaatataatggcttgtaccatgtcttacatggagtcttgtccccaatggatggagtaggcccagaagaaattaacattaaaagtttaattaccagacttcaaaaacaagatgaagttaaagaagttattcttgccctaaactccagcccagaaggtgaagcaactgctatgtatctggccaagctgattaagccagctggcttaaaggtaacgcgtcttgctgctggtttagccgtaggtagcgatattgaatacgccaactcaattactttgaagcgcgctgttcaagggagaacagatctatgattggaaaaaggaacaaagttaaaaaagcaggcgacgaacgattactaagaattgttgctcaactgcaaagacaacttgctgaacaaaaagttttcgatcaaacgacaattgattattcatttgataatcgagttttaaataaaattctccatgcaaaatttatttttttgtatgaagaagccagaagaagaaacactaaatctagtagctcatcaagcgctattactagataatgtagtccactgcggtggactttttttgtggaaaaataaataatcttgaaaaaacaagtctgtctttcttttttcttttacagtacaatgccaagtgggggtagacatgagaggatatttaattacatttgaaggcccagatggggcaggaaaaactacagttattaacgaaataattaagcaattaccgcaaagtttgcaagaacggactcttgtcacgcgtgagccaggtggatctaagatttcagaaaatatcagaacaattattttagatccagaaaataaagaaatggatgatcgaactgaggctttgctatatgcggcccaaagaagtcagcacgtaagtgaagtaattcgtccagccttagcaacgggtaaggtcgtcttatcagacagattcattgatagttcactcgcttatcaaggcgtaggtagaaatctaggcattgaagaagtaaagcaaattaatgatttcggaactggcggacttgagcctgatttaaccatcttcttagacctagatccagctgttggtttggctagaattgaaaaagagcgggctggtcaagaagatcgacttgaacaagaaaaaattgacttccataataaggtctatgctggctatcgtgaattatttgaacgctatcctgatcgaattaaaaaagtagatgctaatttgccgatcaaggatgttgcagctaatagtgttaaaataataagaaaacaattacctgatatttttatgtaaggatttggtaagaatgaaacttgttttagcaatcgtacaagataaagatgcagataccttagcaaaagaatttattcaaaatgatgttcgtgcaactaaattagctaccagcggtggctttttgagagcagggaatacaacttttatcgtgggtattgaagatgaccgcgtaaatgaagtattagaaatcattaaaaggagctcccatactagagaacaatatgtatcgaatatgaacatggatgctgcaggcacttccatgctgggaaaaccagtccaagttactgttggcggagcgactgtctttgtattaccagttgaggaatttaagcaattttaatgattgatttaaaaaatatcggccaaaagcaggctgatcttttaagggatgcatatttaaataaaaaagttgcccatagttacttgtttgtcgatcccatgcaaaagaagggaataaatacagcttactggctggcttgtctctttaattgtgtaggagaagataagccagacggaacttgtaacaattgtcagagaatcttagagggaaatcatcccgatgtcttcttagtaaaattagaaggtaagcaaactctctcaattgatcagattcgtcctttaaaagaagaacttgctaagagccctgttgaaggaaatcgccgcttttttataattgaaaatgcggaaaaattaactttggctgcaagcaacgccttgcttaatttattagaagaaccagtagcaccagtcgttaccattctgatcacaaataatgaaaatcaaattttaccaacggttaaatctagaacccagattcttaatttctctgatgaaaagattgacagtaaaagagcacaattacttgaatatggcttaacagatgaagaaattgatgatctaggcgacacaagtaagcttgaagaagagagcaagtacttgtttcaagaattattagaacgtaatgatttagccttggtgcgtgtgaatcagattagtagtcttgctactaagccagcgggtcaaaagtttgttttttatcagcttaagactttggcgatgaagagcttagaagctggtcaaaagttaagggaaagtgcatctttattagagttattaatgacttgcgataagatgcgagctagtaatgttagtttccacaatacattagattatttagtattgagttttgaacggtaggtgtttttgagtggatccattttcacaattgtcacaattacagcacaatcttcaggcgatgacaaaaactgttgccggtctggaaaatgacatgcttgaagtattgaaagaaaatacagaattaaaagttgaaaaccaactattaagagaaaagattagtaagctagatgcaaataaagaaccagctgagaataagtcacaagctggtttgaagtcactgagaaatatttacgattctggttaccatatctgcaatatgtactatgggtctcaccgtgaatcaggtgaagattgtatgttctgcttagatattttagataattttgtaaatcacggacaaaagagtaggggataaaaattatgcaagtgcagagtagttttaatgaaaaagataagggacgtctgtatcttgtccctactccaattggaaatttagaagatattactttaagagctaaaagaattctaactgaagctgattacattgcagcggaagatacccgaactagtggaatcttgcttgaaaagattggcgttcataataagatgatttcttttcataagtataattctaaagagcgtgctccagaattgattaagctgcttaaggaaggaaagacaattgctgagatttctgatgctggaatgccagtaatctcagatcctggttatgtcttggtgcaagaatgtatcaaaaatgatattcctgttgtctctcttcctggtccttcagcttttgcgactgccctaattgcttctggctttgatgcacaaccctttacttattatggttttttaccgcgtaagagcagtgagcaaaagaagtactttgaaatgatgaacacttcgcgtgctacttcaatcttttatgaagcaccgcatcgcttgaagaagaccttgaagactttagctgaagcaattaagccagatcgaaaaattgccttggctcgtgaattaactaagattcatgaagaatatatccgaggatcaatcagtgaaattaatgaatacttcactgagaatgatccacgaggtgaatttgtggttttagtttctccgaatgaagaggaagaaaagcaactttcttgggatgaactaattaagcaagtagccgatcaagtagcagctggtgaaagtaaaaaagatgcgattaagtcagttgctaaggcaaataaggtttcaaagaatgaactttatgacaaataccatcaaaattaagcacgaggattaagatggaaaagatttttaaagaagagcaccaagttagctatggtgattgtgatgaaacaggaaaaattcaacttcctcatttaattgagcattttatgcaggtttcaaatgatcaattaacagcaggtggtgctgggattcatgatttactaaagcaaaatctaggttgggttgtagttgagtatcatcttgatattgaccgcttgcctgaagctggtgaaaaaattactgttactaccaacggtagtggatataatcgcttttttgaatacagagattttggtataattgattctactaacaaaaagatagtgggcgtcaaaagccaatgggtaattttagatttgaaaaatcgtaaaattactgaagcagatgatcaaatgatgcagaaatttggaaatccatacttgaaacatatgccgcgctttaagagattacgtcccttaaaagaatatcgctcaagtaagaaatatactgttagatattatgatttagatacaaaccatcatttaactaatagtatttatttcgattggatgattgataccttgccaagagagttcttgaactctcatactgtcaaaagtattgatatttcatttaaaaaagaagttcaatacggagatcaagcactagcagaagtagagcttgaccaagatacattgacttcgtatcatttaatttctaatcagggtgaggcgtctgccttggctgaaattaattggaaagaaaattaaaggcatgacttgttgttagtactgtcgtgctttttttgaaaggtagggatgccaatgaaggcaggaataaagaaattagatttgcaggggttagttaccctggcactctttgtagcaatggatattgtgcttgagaagatatcttttggtccatcaaccttaaaggtaggattaggatttattggaagtgcattgcttgcttattatttcggtcccttgtggggcggaattggggcattagttagtgacttgttgcggtcagcgatttttggagttgagggaggcttcttcccgggctttacgctgtcagcaattgttggtgtggtaatttacgccctcttcttatatcaaaaaccaattaagtggtggcgtattattgcctcaaccttattagttaccttagtggttaatgtcttaatgaatacttactggattcatctattatatggcttagatttaagagcagcatttctacaaagaattctaaaagagttgatcactccttggattcaaattgtcgctctttacgtgattttaaatgctcttcaacgtgttaaaataagaaggtaatttcgataataataaggatagaatttaaatgaaaatattaagtattactactgcaaccaatcatttgagcgtagctttgaatgatggagataaaatttgggaaaagaacgaagaagatcatcgaaatcatagtgaacatttagatcctttaattaatgaattgttgaaggaaaacgatcttactttaaaagatattgatcgttttgcagttgcagaaggtcctggttcttatactggtttaagaattggaattactactgctaagatgtttgcttctattttaaataaggacttagttggagtatcaactttagctgcattggctaatggcgcaagcgatggcttaatcgtgagtgaattagatgctcgtaacaagaatttctttgctggtgtttatcgtaaggctgacggcaagttagagaatctagttcctgatggccactatcatttagatgacttgatgaataaggtaaaagagctcggcttatctgaacaagttatctttgttggtagctcaattgaaaaataccaagatgaaattaaggacttgctaggctcagataacttcactcaagatgtaggtgataaccaaattcatgctggtgaaattggaaaattagctcttaataaagaagcagtagatcctgataaaatggtgccaaaatatttgagacgtacacaagctgaaatggactggcataataagactggaaaggcatttggcccggatagcgactatgttgaagaagtttagtttattttttcatccggtagaaatcgacctcagctttacgccctttgcattaaggttagataatgaaacttatcagattatgaaggctagcgatgagaatattgcggacttattaggtctagagcaagaagtgtactttggacggacgccttggagtcgattctcttttaagagtgaattaaaaaagcatgctaattccttgtacttggtagtttatcagggttcgactttggtgggctttgtagggatgagaatgcaggctcaagaaggtcatattaccaatattgccgtgaaacctacctatcaaagaagaggaattggtgaattcttactgagaaccatgattgggattgctcagaaaaatcgcgcagttcagatgactttagaggtacgcagcgataactataatgctcagagtttatatcgtaagttaggctttaaggataactttattcggaagaactactatactactgaacaagcagatgcgattagcatgattaaggaattgacagattaagaataggaagagataaagtgactaaaaaagatgttcgaattttagcatttgaaagctcatgtgatgaaacttcaactgctgtgattaaaaatgggcgtgaaatcgaaagcttaattgtagctactcaaattaaaagtcaccaacgctttggtggggttgtgccagaggtagcaagtcgtcaccatattgaagtaattacgcagattactaaggaagctttagataaagcaaatgcgacttgggatgatattgatgcgattgccgtaacctatggacctggtcttgttggggctttgttaattggggttagtgcagcaaaggctgcttcaatggcaactggaattccgttaattggtgttgaccatattatgggacacattatggcagcgcaattaaaggatgagattgaatatccagcccttgctttgcaggtgtcaggtggacatactgagattgtcttgatgaaggatccgatccactttgaaattgtgggcgatacaagggatgatgcagctggtgaagcctatgataagatcggccgcgttttaggtgttaattacccagcaggtaagaccattgatgaatgggcacataaggggaaagataccttccacttcccgagagcaatgatggaagatgatgactatgacttctccttctcaggtcttaagagtgccttcattaatacttgccaccatgcagatcaaattcatgaagaacttgataagtatgacctagctgcaagcttccaggcttcagttgttgatgtgttaagccacaagacaattagagctattaaggaatataagccaaagacctttatcctaggcggcggggtcgccgcaaaccacggcttgcgtgaccgtttagcagaagaaattgagaagttgccggctgatattaagccgaaggtgatcttgccagacttgaagctttgcggtgataatgcagctatgattggtgcagctgcttataacttgtatcaagcaggtaaattcagtgatgtgaacttaaatgcagatccttcacttgagttgccatatgccgacagcatgttgaagtaagagctagacaaagcataatcgtaaatagttaatagaataagttattttataaagaaccaaatgatgttgaagaacaatgttttttcttcgatgtcgtttggtttttttgctttgttcgtaaaccaccttgacaaaataaaaaatggggggggtagactagaactgtatctaccttttagatcaaaaccagttatttaatttgtttggaggagtaagaatgaaaagtaaaaataacaagttaatgtatgtctccgctgcagtacttgctgctggtgcagtagctggcgttaatactcaaaacgctcatgcggctgaagttcaaaagcaagctgataagaatgcagcacaaaaaacaattgatcaaaatcaaaaagatttgactcaaactcaagatcaattaaccaaggctcaagcagagcatgatgatgctgttcgcaagacctcagatgctcaagcaaatgttttaactgctgattcaaataatcaatcagctcaaaatgtattagaaaatactcaagatcaattaaagactgctcaagatgcccaagctaaagctcaagcaaactatgatgcttcttatgaaaacaatgttaagtctgcacaaaacgatgtgaataaggctaacgctgatgttcagaccactcaagaacaaatcaatgttcaaaatactaaacaagcagaagctttaaatactcgtcaaggtcaagaagatgctttaaagactaatactgaaactttgaataagactaatgaagaaattagtaagactcaaggtcaagttgaacgagctcaaaagacttataatgatgtaaataaagactatcaaccagtcaaagcagaattagacaagcaaacaaaagaagtagaagatgctcaaaaggctgcacaagaaaatgctaaggaattaactcaagcacaaaacgatttaaagactgcacaagatactgcaaataaagcagtagaaactatcaataatgcacaagcaaaattaaataatgatactgaagcattaaacggtgcaaagatcgaattaagttcaaagcaaaaacaatctagtgacttaaccagccaaagagatcaagtagctaaagaattgcaagctgcacaaactaagatgaatactgcaaaagcagaattagatgctgataaagatgcagtagtcaacactatggttatgccacaagtctataaagatacagtaaagaagtggtcgactagagatcatactgatgattatgacaaagaaatggaagccgcaagttggattggctggacacaaaatgaatacaagcataatgaagccgaaaagaatcacatggtcgatttaaagcatatgtcaagagctgaccaaatcgaattgaataagtttggcattgatttgattaatcaattaagaacccaaattggtgtagatccatggacatttaatgaatcagctttagactttgcaaatgcgattgcagatagatatgtaaaagatgattgggattccgataaagatggtcatgatagtgccgcaattaatgaattagcacatcaatatggcttgcaatcaaagatgcatagagatggatcattcagcaagtctggtcaatactatgagaatatgatgactgatagattcgggcaaactgaagcaacatatgcgcaagctaagcgaatgaaggctgacggtagtactcaatcattacaagaattagcttataatgtcgcattatcgtataatcattcacaagacaattataataatcgattagatgatatggatcacctaaagaatcaagtatataacacagttaagagatttgcattcaattataatgaatggcttcatgcatatggtattttgtcacaagactttttcaattatagtgcaaaaggtaaaaactatgccgcaattagtttcaatgtgaagccaacaaaagataaatggggcttcgacgatatgcctattcacgtagttaatgttcatgaatctcaagtgttagatccaaaagtcttcaatgttaatgcaaatattcccttgaaggatgataagagcgcactgaaaaagcaatacactgataacttagttttagtaaacacattaactcctaagaaagctaacttagacaaccaaattaacggtttaactaacgatattaaaggacttaatactcgcatcagtgatttgactaagtcaattagtgatactaacaagagccttacagacgcaaaagcaactaaggcagatgcagataagaagattacagttctaccaggtcgcgttcaagaattgaaagataaacaagcatccctaaatgaagctcaatctaaagcagaggctgatttggctacttaccaagctaagaataaagatcttcttgctcaatttaacgctgctaaagctaacttagataagttaacggctaagctaaatgatcttaacagtgcaaagagcaaggctgaaagtgcagtagcagaaagcaaagtaaacttagacaaggcaacaagtgaattatcagctatttcctctcgtttagatgaattgaaagctaagttatcaactgctaaaactattaaagaacaagctgacgctaacttagctaaggctaaagctgcatatgatgaatatgtaagtacacataaagatgtaattgataacttgaataaggcaaatgctgaattagcagataagactaaagcttataacgaagcaaaagaagatgctgctaagactgataaggaataccaagctgctcaagatgaattgactaagttaaacaatcatattgaagacttatcaacagtaattactaactatgaatctaagatcaagcaattaaatactacaatcaacaagcaaaaggcagaccaaaagcgtgctgctcttgatgctcaaattaataaggctctagataatgtttcagctcctaagcaagctgccactacaactactggtgttcaagctggcacttctagctctgtagcttcagtaggtgctgtatctactactcaaagaagtgaagtcttaactaacactgtagtaagatcaaatactgcatctgttttaagccctcaaactaagaagttagttgcccaagctaatgcatctaagaattcattaccacaaactggtgccaacgataagcttagtgtatttgctgctttagcaggattgtctttagcatccctaggcctaggctctttagtaggcgataagaagagaaagcgtaactaagccgatggaagaaaaagaagttctaaaaaagcttggctttaaagacgaagcatcattacaacaagtagatcagttaaagaattatgagcttaactacgtcgatgaccactttgatctggtagaaaagaataaggcagcagtacagaattctgtgaatcgcttatccaatgctcagcaatttatgccaattttctattacagtgtttatggtcgagtaattataagtggttggcgtgcacttttaaatattaattctaatgacttaaataagaatgagactaagagtaaatcagatttacgtcataaccaatcatggattagtgcaaaatctgatgagaataatgtttcatctattgatagactaatgcttggtaaaaaagcgacagttttaatagatgaaaaagagcaagaagctggtttaagtagattaaaagttgatcgaggtcatatcttaggaaagtttagcaatttgctttcacaaattgagcaattcttaggtgatgaacaaaatgtcaataacgttgatatttaccctcaatttaagcgtgcaaatgaaaatgctaaaaatgatcatggtcagttatactttgaacatttaattggaaaacataaggatactccaatttactatgaggcagaagctatcttcgctaattttgatgataaggttcctatcggaacaagaattaaaattgtcaaaattgaaaaagaaaatactaaatatatcatagcacctaatgaagatgaaatttctttccacgtcttcattcctaactgtgactacgcagaaaaagatccaaaatcagttttgaaatctgaaaacacggtagatgattatcgcaccttctttaaaggaggtaatttaaacagtctaaaatggaaataggctgttaactccaaagaataaataaataacagtttgattttttaattagggtgaaagctctaatccacttatcttttattttatttttacataaaatatcgtttaacatttttcatcgaaaacaagcaactgaaatggttgcttgttttttttgtgtttaataacaaaaaagaccttattctgcctataaataaggattattgttataataagaagtgaaagatcaataatcttgaggaggaaaatttattatgaaagatgaagttcaagctccacaagaggaaactcctaacacatattggcgttggctggtagagtcatggcgctatcctctcggccacaacctaggggaaaagtggtacggagtcgttaccttattaggtgaagatattgtattattcattggtttagctattactagtaattatattgctaatatgtttgatattacgctgatccatcacgcatcaggttttaccttctgggcaatcgtaattctgttctgtattcaaattattacgattctttgttccatggttggtcacctgttcgtgttcggtagtaccggcggcttttggcagtatgtcaacaaggttgcacaagtaactaactggaacttctggattgtaatttgtgcattcttcttcttaatcctaagcttaagttcaggcttgcttggatttggggaagccttagtttggatcttctatgcactgttttctttaggttcattcttactggttgtttgtcctgatccaggaactgaaaagatgatccacgatccattctggggtgcagtaatttacttagtaatgattgttgtaatctatgccattatttggggcctagccttcagcattatgatcaacttgtagaaatattaaacaaaaaagatgtcgtttaatcaacgcgtagtacgaagattaacgacatcttttttgttgtgagggttatttgtcagttgtatttttaacgtttgggagcatataacttctgaaaatccatttgaattcttaaggcctcgtagattggttttccacctaagagatctaaaacgaaataagcaataaaagttgccacgagcattggaaagatctgttcaactgagccaaccatttctgttagcagggttaaagcagtaaagggtgctttttcaatagcaccaaagtaagcacacatggaggtaacaataataatgccatagcaacgctttggagcaattccggagtgaatcataatcacggcgaagataacacctagtaaggctcctaaaacaagaattggcataaaaataccaccaggaactgaggcaccatatgagatcattgaaaaaataaagcgaacaataaaccaaataagtggcaacaaagttaaacttagcatcccagtttggatatttttcataaaggttggttcaaaaagaccagagataaaatcgtgagaaccgccaagcagcttcgcattccaaaggccaattggaattactaagattagcggaataatactgtggtagattttagggatgatagtaagttttgaataaatgggtttaaggcttaagaggcagtattggtagaaataagcaagtaagcccaaaagacctcccattaagattacaaaccaataagaagttaaaggtaaagacctatctaagggaagataaaggcagggagtagtgccaaaaaagcataatgtcattaggtcagatgtcattgcagcagctagagcagttaggcattctttcggatcaaaactaaaggttatttcttctactaagaagaagaccccagctaatggagctgagaaagctgcacttaagccagcagcaatcccgcatccctggagtctcttaagatcttcatcatcggcatgaaaaagattctgaccaaaagcttgtccaaccatagcgcccatttgaatacaaggaccttctcgtccaagaaaaagtcccggacaaattgctaaaagccccccaacaaacttacgccacaagatgctccaccaattcattttattttcatcaagcattatggcttcaacttgaggaacacctgaaccagtaatattgttgaggactggtttaataacttgagcaagaatcagacaaattatcacggtcccaagcaggtaaggaacaagatagatcggcttttgacgcattaaaggatagataaaaaatagaaatttcattgtgtggtcaataatccatcggaaagtcccaacaattaggccagtaattaatccaatgataattccttgcaaaaagataaagaaaaaatttgatgtaaatggtttggctaaaacttgtttggccgttttaatcattttctgccagctttctaaaggttgtgataagcctagtttacatcaaattaataagcccaaaataaaaataacgatagcgttttactatcgttatttctgagtattaatattttgtggtctatcttagttttattacttatctccatcaaagatagaagatttaacaataacatagtctactactctgattgcacttagatcttttccaccagcataagaaattgaagactgtagatcttcttgcatctcacgtaaggtatctttaattgagccgcggtatggaactaacatttgcttaccttcgacattgcggtaggcgcctttttgaacttcagaagctgaaccccagtattgtttataacgcttaccatcaatagtaattaagttaccaggagattcttcatgaccagcaaaaagtgagccaatcataaccatagaggcaccgaagcgaacagacttagcaatatcaccattatggcgaattccgccatcggcaattaaaggctttctagctgctttagaacacattctaagcgctgctaattgccagccaccagtaccaaaaccggtcttaagctttgtaatgcaggctctaccaggtcccacaccaaccttagttgcgtcagctccagcattttctaattcacgaactgcttcaggagtagcaatattaccagccgttaagaaggtatcaggtaatttttccttaatatacttgatcattttaatgacatagtcggaatgaccatgtgccacatcaattgttgtatattctggaataatattttccttagcaagatagtcgatgaagtcgtattcgctatccttaattccaactgaaattgaagcaaataatcccttatcgtgcatcatcttaatgaagtcagcgcgtttttctgggtaaaaacggtgcataacataatagtagccatgttctgcaagccagatggctaaatcttcgtcgataacactttccatgtttgcaggaacaactgggattttaaatgttcgacttccaaatttaactcctgtatcagcctcgctgcggctcttaataatacatttattaggtacaagttggatgtcatcataatcgaaagcttccatactaaaataattgctcatttaatttacctcgtgctctttaaaaactacatgagttaatatacgggtgaagttagtcaaagtcaagaataaaaatgaatatttattttattgattattaaaaatgttcggaaatcaattgactattaagatatagattgttaaactagtcttcggttttaagaaaatgatttttatgaggtgaaatcaaatgacagcaatagcagttgtaggtagtcaatggggcgacgaaggaaagggtaaaattaccgatttcttaagtaaagaagcagcaatggctgttcgttcaaatggtggtaataatgccggccatacaattgaaatcggtgataagactttcaaaatgcgcctaattccatctggaatttttgctgctaagaagggtgctgtaattggtaatggtgtagttatcaatccagaagtaatgttcggagaattagataaccttgaaaaagaaggtatcgacattagcggcttgaagatttctaaccgcgcacacattattatgccttaccacattttgcaagatacttatcaagaagaagcaaagggtgacaagaagatcggaactaccaagaatggtatcggtccttgttacatggataaggcttcaagaactggtatccgtgtttgcgatttacttgaaagagatacttttgaagagaagttacgtactaatttagctgaaaagaatgctttattcactaaggtttacggtaagcctgaacttaaatttgaagacatctttgaaaagtaccttgaatacggtcaaaagatgaagaaatacgttactgatacctcagtagttgtaaacgatgctttagataacgacgaaaaagttctttttgaaggtgcacaaggagtaatgcttgatattgatgaaggtacttatccatacgtaacttcttcaaacactatttcaggtgggattgcttctggtatcggaatgggtgctaaccgcttagatactgttattggtgtctgcaaggcttacactactcgtgttggtgaaggaccattcccaactgaattattagatgaagttggtgatcgcattcgtgaaactgctcatgaatacggtactgttactggtcgtccacgtcgtgtcggttggtttgattcagttgctcttcgtcacgctaagcgtgttgctggtatcaacgctttaagtttgaacttattagatgtcttttctggttttgacaagattaagattgccactgcttacgaacttgatggtgaaaagatcgactactacccagcaagtttgaaggaattatacagatgtaagccagtttatgaagaacttcctgcatgggaagaagatattaccaatgtaaagacttgggaagatttaccagaaaatgctaagaagttcttgaaccgcgtttctgaattagtaggtgttcctctagttactgtttcagttggtcctgaccgtgaacaaactattgttttgaagaatccttgggaaaaataatttatgttagaacgttatactcgtccagaaatgggcaaaatttggtccttagaaaataaatacgctgcttggttaaaggtagaaatcgctgcaactaacacatgggcagaacttggtgaagtgccagaagcagatgctaagaagattgcagacaatgcttcttttactgttgagcgtgtttcagaacttgaagccattacccaccatgatgtggttgcttttacgagaacagtttctgaaagtttaggtgaagagaagaagtgggttcacttcggcttaacttcaactgatgttgtggatactgcacaaggttatatcttaaagcaagctaatgagatcattttgaaagacttagaggctttaaaagaaactattgccgaaaaagctaagaagtacaaatacactgttgaaatgggccgtactcacggtgttcaagcagaaccaactacttttggtttgaagcttgctcgctggtatgctgagattaaccgtgatattgaacgctttaaagcagcagctaaagatgtagaatctggtaagatttctggtgccgttggtacttttgcaaatgtgccaccagcagttgaaactagcgttttaaagcagttaggtttaactcagcaacctgtaactagtcaagttttaccaagagatttacatgcgtactacattgctacaattgccttaattgcaaccagtattgaaaattgggctactgaaattcgtggtttgcaaagaagtgaaattcatgaagttgaagaacactttagagctggccaaaagggctcttctgcaatgcctcataagcataatccaattggttctgaaaacttatgcgggatggcgagagtaatgcgtggctacatggtaccagcttatgaagatgtagctttatggcatgaaagagatatttctcattcaagtgctgaacgtgtaattttacctgatgcaaccattggaattgactacatgttgaaccgtttcaaccgcatcttaaccaacttagatgttttcccagaaacaatgctcaagaatatggatcgtacttatggcttgatctattcacaacgtgtgcttttgaagttaattgatgaagcaggtttatcacgtgaaaaggcttatgatatggtgcaaaagctagctaataagtcttggcaagaacaaacttcatttagaaagttaattgaagacagtgaagttatgaattacttgtctgaagaagatctagacgatgcttttgattatcattatcacttgaagcatgttgatgaaatttttgaaaagtgcggcttagattaagatagaaataaagacgttttgttagatataattgtgtctgacaaggcgttttttgtttgggataaggggaagtatgaagaaagaaattttaaagaaactggaatatttaaataagctctatagaaatgggtattggggaagtgaactaccagaagatacgcgtcctaaaaagttagatcctaattctgaagaaaatgctatcttctatactttaccaacagctctggattatcaaagaaattccaataccttatggaaaagtgctacagcaacttttgaaaataatgaaactaagtttgtatttaatccaggagaagtagtaaagaaagagtttactgaagtgcaagatgccttgactaaatataatttggctttgcagaaaaataagcaaacacaaatttggattaggttgtgtcagactttagttaataactttaatggaagagtaacggatttttttgcctattttgataatgacattcaaaaggtacggcactacatgcaggttgaaaagaaaaaagattttccgtacttatcaggtaaaaaattgtgcaattattggctatatgtgatgtatcaatatacgaatttacctttgattaacactgataaaatttatattgcaactgatcgacatattattagagctacacatcggttaggactaattacagatgaagaattagagagttcaaaagtacaagattatgtaatagaggcttggattgaagctttaaacgatacagaatatgtacccattgattttcaggctgctctttggctatgggcaagaagtggattcaaggaagatttgtagtagaaaaggatagcaactatgaaacaagaatactctgcaggcgctattatctggcgtaaaaataatgaagaaatccaatatttactaattcaaagtcaaccttataaacaattcaagagtgcttgggcattttctaagggacatcttgaagcaggtgagacagaacgggatgctgcaaggagggaagtctttgaagaagtaggattaaagcctgaatttgattttgattttcacgagagttattcatacaaggtcactagcgaaattgaaaagacagtaactctatttttagcagaatataaagctggtcaaaaaataaagcggcaagaaagtgaaattagatcgactgaatggttaaattatagagatgcgcaagatagaattagaaaacagaactttaaagaatttaaatttgaagatttatcagcaattttggctaaggctaatacttatttgcttgaacatgaataaaaagtcgttttgattgaacgactttttatttttgctaaaattaaaactttttatatagataaatgaatttgaatagaatgttaatgaatttgaatataaatagaggcttaatgataagaactatatagtacttataaaacaaaaacggagatgagaaaaaatgatgatagatatagtgctaatcctaataatatttggcattattttgttaataagtaaaaaacggccacaacgaatttggctcttgttagcaattatttttataggatttagtatagcaaattttatgttagtctacttttcaaaagataattgggatttagctttatatgcaatcagtttttatagtttgatttttggtttaatatttttaattatttttttagttaaaagaaggaataaaaaataatgaaaataaaaaattatcttgtcattgcagctgctagtttaggattatctttaatttattctaatcaggttcaagcggatgaaatgccaccaactaatcaacaatcagtaaataataatctatctcaaactgatataaatgaattagataaatatgttagtgtagaaaataatacatttgtactaaatgttcctgaaaattctaatatttcttctgaaaaagtacaaatggcacgacaagaaattgagagtgtaaacaatagtattaaaaataataatcttttaaaggaaaaatatatctttctgatatgtagaaaattcgtattcttctacatatttctatgttttgtatagcagtagcatggcaattagaatcatataataatactcatagaaatagtaaaatttatatggatattaattgggcctatgtcccttcgtttggaacgtggtaaaaagagaggatgaaaataatcatcctcttttctattgaaaaaatagatgatatcctaagatttattttagaaagtttgagtagttataatgtttgctattttcacttatttgctatttctattttcctatagttatcagttattaatattttatgaattaaatcagtatagactaggtagtataaaggatatactaaaaattataataattttagtgattagtataattattctagattttataattgggcaagctatttttttgattttagtaatatttttttatagtaagaaaagccagttaagtaaaatagttagtacaattttatttgctaatttgattacttatgcggctgatttgtttatacgattaattggactgtcatttccaataattacatcgtattttgtgccaatagcagttacttattatgttttggtttattttttaattaaaagagtaaaattataccaattattcattaaagaaaaaaactatcttcttcttggattaattgtttatgcatttatagcgctccatataattggcttaataagtatgaaagcaaatcaagatttaactggaattttaattactgcgctccttttatttattcaatttttgtttatgatatatgcattctatattcagaataagttatttgatagacgattagaggatagacttaataaagaaagagaaaataacctcaagtcatatttgaaaaacttagaatatagtgaagaaaaattacgtagatttaaacatgattatcgaaatatgttaataagcttacgtaatgctattaaagaagataataatgatatattaattaataagttagacagatattcagaaaatgaattagatcaagaaaattttgaagaatacaaagatttgataagagtaaaggatctgcaagttaaaagtattttgattagcaaaataaatgaaattgatagaaataatataaaatttagttttgaatgtgccactaagattgataatttagataaactagttaatccttttgatttaagtagaattattggaattgcttttgataatgcaattgaagaaagtaaaaataatcaaattggtgaaataaatgcatatatatttcaaaatggaaaaacatttacttttgagattagaaataaaataaaaaatattcctcaactgtctaaaattcaacaaactggtttttctactaagaagaatcatcaaggattaggactttcaaatattaatcaattaaaacaaaaatatcctacattatttgtaaattatcgaataaataataattggtttatttttactttaaatatagttggagtagatgaatagatgagaacttttaaaatcgctatttgtgaagatgatagagatcaaaatgaacatatcaattatatgattaaaaaatcatgtatatttttatctagtgaacatcaaaaatttgagataagtaacactttttattcctatgagtcaatatttcagtttattaattctagctctaaacttcctgacatttattttttagatattcaattgagttcgaaaccagatgataaaaatggaattgaattagcaaatttaatacgtaacaagcagaagaccgcacagattatatttataactactcatgatgaattagccttattaacttttgaatatcaaatagaagcattggattatattgtaaaaagtaatgaagaagctaaaattcaaactaaaataacacaagatttagaaaaatcagcttataaattagaagaatttcttgaaaagaaaaataatatttttacttatcaaataggtaataatttttatagagtaaatacagacgacatttattatatttctactacgccgtttccgcatagattgaaaattattgctaaaaatgagattagtgaatttacgggtgatattaagaatatacaagataaaatacccggttttattaaagtttctcaatcttatttagttaatatgaaaaatattacaagtataaatttgaagaagagattgattctctttcctactggtgaagaaattcaatttgcatttagtgcaaaaagaaaaattaaagaatatttgatggctgattaataatttaggggtgtgcgataagataaaaataaaaaagggtcaaattccatatttaatgtcttaagttaatgatattactatttggataggatgactttttgtttttgctatttttaactaaaataaatttgaagacagatattacagaaagtgtaagtaaaaatgtcagaaccaaattatccacatctagataaaaataagccttatccgttagctggaatcttggtaatagattttacccatgtcttatccggtccaacttgtagtagaatgctcgccgatgctggagctcgcgttatccatgttgaaagagaaactggcgatgatacacgtcacatgggaccttatcttgttgacggttctagtgaatactttagaatttgcaatactggtaaagaatcgattgccttagatttaaagaacgcccaagatcatgctttggcagaaaagatgattgctaaagctgatgtagtagttgagaatttccgtcctggcgtaatgactcgtttaggttttgatcctgaagaaatggtcaaaaagtatcctaaattgatttttgcttcaatttcaggctttggacaatacggtccttttgaagcaggtgagacagaacgggatgctgcaaggagggaagtctttgaagaagtaggattaaagcctaaatttgattttgattttcaggagagttattcatacaaggtcactagcgaaattgaaaaaacagtaactctatttttagcaaaatataaagctgatcaaaaaataaaacgtcaagaaagtgaaattaggtcgactgactggttaaattatcaagctgctcaagaaagaattagtaagcaaaactttaaggaatttagatctgaagacttgtcagcaattttggctaaggctaatgattatttggtgagtcgtgagggatagaaggaaacacaagttttgaaaaattagacagaaacttaggattgtttttaaaccagagagatggaggcattaacaaccaaaagtaactaattaacatgagtcaaattaatcatctaggtaaagaattcagttttctgaattctttttttgttataaaattaacaaaaaataaataaaagcaaataaggagatgagattatgaaaattggacaggcgttaaaagaagaacgtcaaaaattaggcttaactcaggaacagatgataaagggtattattagcaagggtcattattcaaaaatagagcgtggattagaaagtatttcaattgatactttatttagaattattttgaaacaccatattgatatcagtgatttttttaataaagttaagtatgattactatacgtctgaagataaaaaagctgaagaattgaagcaaaagatgttgcatgcttttaataacaatcaaagggaaaaagtaggaatttatttaaatgaaatcctagatttaaaagagcatcaactttttaaatatcgaacaataattgctattgcttctttagaaaatagcttatctgacttaagtttagcctttaaaaataaaatagttactagattttcagaacatgaaaattgggtggaaaatatcggtgcattacaattattttctgattatatgaagatattttctttagagcaagtagactattttcttggtcaattattaaaacattatcaaaagaattcttgttctgagagtatgagggaaagagtagcaattatttgtaataattatctttgttattgctataagcaaaaattaaacggagataatattgaagctgcattagattatttagcgagcttagaaacgactactcattttttgctttatcgaatttgtcatgagttatattttaatttatttagtgggaatacagaaaaagcagctcaaataaaaaaattgctgatgaaatgtggatatcaagaatgtatggaatattggcaaatttagttgtgtatagcacaacataatgaataaaaactgaaaaagctgtgataattataaacaacaaatgataaaaataaatttattatttgtgtaaatatttctagataggaaaagtgagctatgaaaaataaaaaactatttgtggctacttttgtagcattattgcttttcgttggtggaggagtatggttttatcataatcagaccacggttcctgaggaatgggttggtcaaagcctaatgactttagaaaaagaagataataggttaagtaattctttttatttaatgtttgataaaaatactgcttatattgccacacgcttaggtggcaatgaagagagcaggtcatcaaaattaagtaaagatattttaaatgccttttcgaagaatggaaatactcgaccacaagctggtgaatgggtgaaattaggacgggttaaaactgagcgattgaaagatggctataaaattaaaacaaggaaagtaacctttgattttaaaaaggcttctaatggagcataccaaagtcaagatggtacttattggcaatttgtccctaaaaaggtggtggaaaataaacaataaaaatggacattagcgatattaatattaaccgtatacaaaaatatgcctgattagaccaagatagatctaattaggcatattttttatgtttaattattgtttccagctagcatcaaatttttgcttggcagtctgaatagctggattaatatttttcttctttttagcatcagctaagattgcttgcatacttgcttgaacttggtcataagcaggtgtggcattcttagttactggtaagaagtacaagtctttagtagtctcagccaagattgctggtactttacttgtattaagtgacttgtaagcttgtgagtttaggacttgcgtattaactggtatatagccggtagttttagtccagtagaattgttctttcttactggttaagaattttagatacttgaaggcagctgacttttgtctagcgctagcctggttaaacatataaatatcagttccttgttgcgcattaaccttgcttggacgaggggcaatgccaaattgatattctttcttcaagccttgttttagatatgcttcattagcagttgaaccgataaacattgctaccttaccagaattaaatggggtagacatatatttttcagtaccagcttgcatgaagtagcccttacgaaccccatcagcgtagtagtcaattacttcttttgaatctttaccagaaaagttaatcttcttagtaaagttgatgcctttttccttcatccccaacatatagtaattgtttaaagcatcaaaaccagccccagttacttgatggtcactcttttgatagatcttttcagaagcagacttaagctcgcccattgtttgcggaactttgagattatattgatctagtaaagtcttattatagaaaagtacttcaactgacttattaaatgggactccgtattgagtattgttaatttttgcgccgttccaaagtgcttgcttaatattacttttagcataggagccccagccaaggtcatcatttttaacataaggagtgaggtcaactagcattttttgcttagcggcattatacaaccatcctggataagcctgggtgatagtcggcaaattatcaggtgattgcattgttgaggaaagcttagactgaagatccgcataattaccgccttggctttcaagcttgatcttgatttttggattttctttttcaaagtccgcagtcatcttcttgagggctttttcagaagaaccggttaatgaataccaaaaagttaccgtagtattcttggtaatcttagtcggaattttgctactagactccttagtttgagtcttagagcatccaactgctaaaagtgccgttccaattgcggcaagagttaacatcttttttctaaatttcatttttcttctcccgtcaattcattttgacaggtactattttaacatgaatttaaaattagccgaaaatttttaaaataataaaaaaccatccctcatcggatggtcaaaaattattcaaattcatctagtgcttctaaagcattttcccagtcagtatttgcttgatttagttgctcttgaacagcagataatttttcttgaagaggtccaagcttttcaaaagaagcagcaatatctggattagccatttcagtttgaatctcttgttcttcattttctaatttttcaattctagcttctgcatcactaacagcgcgttctaacttacgtttttgtgaatcatgagccttttgctcttgataggaaagtttaccctgattttgattagcactagtagtactttcagtttgttcagcttttgcttcttgaacagcagcagcttgtttagctttttcatctaagtagtaagaataattaccattgtagatcttagcgtgaccatcgcgaactgaaataatcttattagctaactcgttaataaagtaacggtcgtgagaaacaaagagcaatgtgccatcataattatctaaagcttgttcaagcacttcttttgcttcaatatctaagtggttagttggctcgtccattagcaagaagttgtctttttcaagagacaaaacagttaaggttaaacgagctttttgtccaccagataattggccaactgtcttatcaatatcttcagcagtaaataagaaggaagctaagattgagcgaacgtctttttctggcatggtcttgtgacgatcccaaatggtatcaagaactgtctttgaaggatcaaggctttgaagttcttggtcgtagtaaccaatatctaagctagcaccatacttaattgaaccatccttaggttcaagttttttcataattgttttaagtagggtagacttaccaattccgtttggtccgataattgcaacacggtcatttttattaacttgaaaatcaatgtcagaaaccattgttttatctggataaccgatagttaagtctttggcaattaagacttcttttcctgaaggacggtcactagtaaagttaatacgaactttttgcttgtgcttaggtggcttaattcgctccatcttgtctaaagccttacgtctactctgagcacgtttagtagtcgaagcacgaactaagttcttttgaatgaactcttcttcttttttgattttttcttgttgcttctcataagcagcttcttgctggttattcatcaattcacgttctttaacgtattggctatagttacccttaaaagtagttagttttccaaagtttaattcaaagatttggttagctaagtgatctaagaagtattggtcgtgagaaacagtgataattgcgccttgatagttcttcaaaaatgcttctaaccaatctaaagtatctaagtcaagatagttagtaggttcgtctagcaagagaactggtggcttttgcaacagtaatttcacaaaagcaaggcgtgttttttcaccaccagaaagagttccaatgactttctgccaggtattttctttaaaattgaaaccattaagaatactcttaatttcagcttgataagtaaagccgccttcttgttcaaagtcgtatgcaagctggtcatagcgcttgagcaggtcttcatcttcaggatgttcagcaatttgttcctgcattttggtaatgcgtttatttttttcaattaaattatcaaacacagtaagcatttcatcccagatagtcttgttttcatcaagggcattttcctgggcaatgtagccgacttttaatcccttattaatggtaaattggccgctagttggttcttgctgaccagtcataatctttaataaggtagtttttccagctccgttaggaccaaccagaccaattctggcattatcaggaacagaaaaagaaatgttactgaaaatagtattgcctccaaaacgttgttcgaggtcttgagcttgtgcaataatcataataattttctcctagagcttattttaacatagcaaatgttttaaattttatgaaaatattatctttgtgaaaattgtttcttgatttatccttgaagaatgcctattattagtttgattagtaaatatttcacatttttattttatgaaagaaagaggcctctcatggatgaaattaagattcctaaggctaccgctagacgcttgccactttattaccgctatttgatatttttgaatgatgaaggaaaagaaaaagtatcttcaactgaacttgctgaagctgttcaggtagacagtgcttcaattcgtcgagacttttcttattttggtgctttaggtaagcgtggatacggttatgacgttaagaacttacttaatttctttaaaaagattttaaatcaagataccttgaccaatgttgccttggttggtgttggtaacatgggtcatgcgcttttaaattataactttaagcgtactaataatatcagaattagtgccgcttttgacattaatcctgaaattactgggacaattatgtcaggtgtgcccgtttatgacatgagtgagatgaagaagcaattgcgtgaacaacagattaccattgctattctctgtgttccccaaactgccgcccaaaagacagctaatgaaatgtttgatgctggaattaagggaattatgaacttcacgccgcttcgtttatctgctccatctagtgttcgggttcaaaatgttgacttagcaactgaactgcaaactttaatttactttttggactcagataaagataagaacaaaaaataatttactataatatagtccttttgcacaagtttaggtaggcttgtgtattttttatgcgcttttatttgtaattaaagagaaaataattttaagatagatgagcgtagaaaaattaatgagatagaaatcaggtagataaaatgattaaaaaacttgcagtatactgtggtgccagggctggtaatcgtcctgaatacattaaggctgcctataattttggtaagaaaatggccgaccaccaaattgaattagtttatggtggcggaaagttcggcttaatgcgggcagttgcagacggtgttttagaaaatggtggtatcgtccacggcattattactgaagaattaaaagatcgcggagcttcttatgataaagtacaggatttccgtgtggttcccaatatggataagcgaaaagataccatgatgaatctagcagatggaatggtagctttacctggaagtattggaactttagaagaaataagtcaggctatttcttggactgcaattggtgacaatgctaagcccgtagctttttataattatgaaggtttctatgattatttagataaactccttaagcggatgaatcaagatgattttttagagaatatctatttagacgcaatttattttggaactgattttgataaaattctacagtttatggaagactatcaagcacctgcttatcggaagtattaataaaagatcgactaaagtagagaaaaagtatgaaattaagactgttttaggcgctcaagtagaagatattattgaaaaagatgcaccagattgcattttaattggaccgcaaattaaatacatggaagatcaacttaaggcggatgcaaataagcacgatatacccttagaagcaattgggatgcaagattatggcacaatgaatggtaaaaatgtaattgcccaagctgagcgattactaggataaaaactggtagaagtatgaaacaaaatccctctcttgattcatacttctttttttgaccacttagaactataaaatgaccgcttagttaacttcactagattttaatcttacattcatgtttaatataattatcgaaaatgaaacaaggaagtgagaattgtgaaagttaagcttgaacttgatccggatcagaaggaaacagaaataaccattcatgctggtcagttaacacctgaaatagaaagaatttatcaacaacttcaaatggattcagatcatcctgaccaaattgaaggaatgatggacaacacttcctactatttaagtattaatgatattttgttttttgaaacagatgctaagcaagtaatggcgcacacgactaggaatgcatattttgttaaatataaattatatgaattagaaaacttattaggtggacagttcatgcgaatatcaaaatcgacaattttaaatttagatcagatttatgctattactaaatcgatctctaattgtcagattaaatttcatgattcatataagacagtctatgtttctagacgatattatcgagatttaaatgatagattaaaagagagaagggcattatcatgagaaaggccagttttggaaggattctttggggcttaggcctgcttgcagcagcagcgtttttagtgttagaccagttgcatttaattccagtagagttaggattctggacaattttttggactgtagtatttgcggcaacattaattacttccttaattaatagaagtttaggtggaacaattttttcaattgcatttttattaattatctatgcaaagcctcttcacattgaaagtattgttccttggacagtgcttttagcagcatttttagtttggggaggtttaagattaatcttcaaaaaaagttggaagccaactgtaattattaatggtgaaaaagtcagtactaattggtctgacttaaaggcacctcataaatttaaggctgaacatgtattttctgatacaacaagttcagataatggtgacaatattgtaattagcgaaaaaatgtcttctacttcacgttatgttcattcacagcatttagagacagtaacgataaatgtttcaatgggagacgttaatgtctatcttgattcagcaaaaccagctggggatgaagtgattgctaacgtgaatatgtcaatgggagatttaaccttctacattccaacgtcttggcgggtggataatcaattaaatcaaggattcaatgatattactattgatggtgatcaaccagcagagggtccaaccttagtgcttcaaggccgcgccaatatgggagatattactgttaagagagtttaatatattattgtttcaatttaaataaaaaagaagtaaactattatagcaaaaaagagagttactggtaatagctctcaaatcacaagccgctaaaatgcggtggcaagattaataacaaactaaaagtcgctatcaactccgccaaaagttatcaagcggctttttagtttgctctattttctcttccacaaatcgtggatagtctttactagtttctctatagcttttacaagcttttgtgcattgtttactagttttattaaagctagaaattgaacttataaatgtaatgctgtaaactatttatagcataaaaaagagagctactaccaatagctctctcaaatcacaagccgctaaaagtgcggtggcaaatattgatgcaaacaaaaaagtcgctagcaactctgccaaaagttattgagcggctttttcatttgctctattttctcttccacaaatcgtggatagactttatcagtctttttacagcttgcgccaacttgtctgcatcgcttactagttttattaaagctagaacaatacagtctaagaaaccaataaaggcaaggacagctccaaaaatggctgtcatgaagcaaattgtacctcctttcagtaagaatctgtacaatagtaattacaccattggcatcatctcctcaaacgaaagtaccaccgcatatttaactttttgtgcgtgtttaattttatcaaaaattaccaaaattaatctacatttatgagtaaattagcactttttagcactctgatgataaaagtgctaatttttgcgtctaaatacttgcttttcttttataaacaatgtactatcgtaattgtaagttagcacttataatatatgagtgctaagtaatataattatagatttaaattatgtacaggagggactaacgtgttacaaccaatcggtgatcgcgtgatcgttaaagtaaaagacgaagaagaagaaaaagttggaggcattgtcctggcttctaacgctaaagaaaagcctcaaatgggcgaaattattgccgtaggaaatggtaagcgcaacgcaaatggcgacttaattcctatgtcagttgcaaaaggtgaaactgtattctttgataaatactctggcactaacttgaagtacgaaggcgaaaagtacttagttcttcgtgaaagcgacttattagctgtcgttaagtaataaaatttgaaataaaaggtggcatataatatggctaaagagattaaattttctgaaaatgcaagacactcattattaaaaggtgttgataaattagcagatactgttaagacaactttaggacctaagggtagaaatgttgttttggaaaagagttatggtgctcctgacattactaacgatggtgttactatcgccaagagtattgaattagaaaaccattttgaaaatatgggtgcaaagcttgtttctgaagctgcacaaaagactaacgacattgctggtgacggtactactactgctactgttttaactcaagcaatcgttcgtgaaggtatgaagaacgttactgctggtgcaaaccctgttggtattcgtcgcggtattgaaactgctactaaggcagctgttgacgaattacacaagattagccacaaggtaagtactaaggacgaaattgctcaagttgcttctgtttcatcagcttcaactgaagttggtaacttaatcgctgacgcaatggaaaaagttggtcacgatggtgttattactatcgaagaatcaaagggtattgatactgaactttcagtagttgaaggtatgcaattcgatcgtggttacttatcacaatacatggtaactgacaatgacaagatggaagcagacttagacaacccttacattttgattactgacaagaagatttctaacattcaagatatcttgccattattacaagaaatcgttcaacaaggtaagagcttattaatcattgctgatgatgttgatggtgaagctcttccaactcttgttttgaacaagatccgtggtacgttcaacgttgttgctgttaaggctcctggctttggtgaccgtcgtaaggcaatgcttgaagatatcgctatcttaactggtggtactgtaatttcttcagacttaggtcttgaattaaaggacactaagattgatcaattaggtaaggctggcaaagttactgtaaccaaggattcaactactattgttgaaggtgctggttctaaggaagctattgcagaacgtgtagaccaaatcaagaagcaaattgctgacactacttcagactttgaccgtgaaaaattacaagaacgtcttgctaaacttgctggtggtgttgctgtcatcaaggttggtgctgctactgaaaccgaattaaaggaaagaaagtacagaatcgaagacgctttgaacgcaacccgtgctgctgttgaagaaggttacgttgctggtggtggtactgcattagttgatgttatgaagtccatccaaggcactgttaagggtgacagcgaagacgcagaaactggtgttaagattgttatgaaagctttaggcgctcctgtacgtcaaattgctgaaaacgctggtaaagatggtgctgttatcttagatcacttagaacatgaagacccagaagttggttacaatgctgcaactaacaagtgggaaaacatggttaaggctggtattatcgacccaactaaggtaactcgttcagcacttcaaaatgctgcttcaattgctgccttgttattaactactgaagctgttgttgctgacgctccagaagatgacaagaaccaagctcctgcagctccaaacccaggtatgggtatgggaatgtaatttagaaactaattacatttactaatttaataaattgataaaacactccatgatttttgatgatcatggagtgtttttgtgtagtagagtataatatcttaataaaaaattacagtttaattttttattaagaaagaagatgacagtgatgaccattggcgaagctttaaaagaaactagaaaaaatctaggattatctcaaactgagatggcgtatcctattctgacaaaatcatattattctaaaattgagcggggaatccacgagattaatgccagtgatttaattaagattttagaaatgcatgatgttgatattagtaaatttctagtaaaatgcgggttaaggataatagaattgataaagaatattggggagagcagctaagccaggcctactatgatcaagacttgaataaggttaaagaactagaattagaaataccaaatattaaaacagataactatactaaagatcttttaaaatcaatgattattctgaataaggcaaatttacaggggagtatagataccttacctgatgaaataaaaaaacatgttaaatctctaattttcaaagcagaaaattggaataaagaaaatctcagtttattctcaattagtcttcctttatggtcagatcaagaaatgaaaccaatagtaacatctcttttgaaaaaatatgttaatattgaaaactttccacgagagatgcaaattttagtctcttcaataatggttaattatctgtccctattgattagatcatcatcacaaaatttagacttagtagaagatatattcattttattagacaatttaccagtaaaaccattaaattgctttggaaaaataatgaaaaatttttatcgagcatattttcaaggcgatgaggaaaaaatacaggatatcctagacttttttactaacaacgatatgaataaaatttctgaaattttaaaggtgtcaatttagacactttttattttgcactaaagatgtgagtaaaatgataaatataaaaaataattgcctggaaatataatcattttcataatcagatttatatggatttgaattggaacatgacatatagttttcatattttacaataatggaatgagttacgtatgaataatcaatttcaattttatcttataatactatcaataatcgtaagttttattctctattatattattcgaccaagaattccaattttatacgaagcgttagtatgtacgtatgtaactctattttgtctgtatttagtaatacaaggagaatacatactattaatcggtgtagttatttttactgtattatctatttactattggaaaaaatattatactaaaaaaagtaactaattctttaaataggaaattctatattaattaacacattattaataaaaaatggatttatatagtataatctaataaaaatattaaataaggaggatcaaattatgccgacagtagtattaaatgctcatcaaaatttacaagacaataaataggtgagcggagaataattacaattcattttgttgaatccgttcatcaaggaggacaaaatgaatcacgttaaaaaattaaatcagtacttcaaagaattagctagaacttatcatttattctttaaatcagcacctctaattgcgacttgcgttttattattagcacccttgcaagcggtagttctgttaattgccgtagcagctggacaaaaggtaattgatcaagttactaatcattcaccctttatggaaatgatcattgtatggattgtagcgactgcgtttcaacagtttttaccatctttatcaacaatggtgcagggaattttaactgataaattaacaggtttcattaacattagtttgatgaaaaaatctgaagatttacagtcaattaggatttttgacgacagtaaatactttgatgatttacaaatgcttcgagatgatgcaagctggcgtccagttaatttgattgtttttggagtatcagttttgcagtcgtttctaacgttagcttttatgttagtgtacttggctcgctataattggtggctggcgcttttattattagttgtaatggtgccgcaaagtatttcttattaccgtattcagcagcaatcatttgagacaatggttgaaagaagcaagaatgctagatacttacattactatagtagtttgttgttagaccgcagggatgctaaagaagttcgactttttaatatgtttcctaaaattactgaaaagtatacgaccttatttgaacagactaaaagggatgtaaatcaaattcgtaaaaagcaactcgctgttagttcattatttgttcttctaactgttggagtggttggttacggtttttattggtttactaactcggtgagaactggtgctctagaagttggcgttttgttaatgtttgtttctgtaattggttatatttccacaagtatggcacgagtagtggaagatagcagtctactctatgattccttactgtggattgaaaagtactttaattttcttgaatatcacgatgattttaaaaatggaaagcaagaatttcctgatgagtttaagaagattgaagttaaggatctttcatttacatacccattttctgatgatgaagttttacacaaggttagtttttcagtaaatagtggtgaaaagatcgcaattgttggtgaaaatggatcaggaaaatctactttagtaaagttgttaatgcgattttatgacccgactactggagctatttcgattgatgatgataatttaaaagattttaatatttttgacctacataaaaatttatcagctacttttcaagatttttctcgttttaagttaacgcttaaagaaaatgtgattacgggatattcatttaataaagaccgagtaaataatgttttaaaagcagcaggcctagagaatttgctggctaatgatcatctgcaactaagcacgattcttgctaaagattttgaaaaggggactgacttatctggtggccaatggcagaagattgctttagcacgagacttatacgcaaatggtaaaattgagtttttagatgaaccaacagcagcgttagatgctaagagtgaagcagaaatttatgagcgatttttaagagaaaacaatcaaaagacgatcttctttgttacgcacagactatctgcagttaagtttgctgataaagtactctttcttgatagtgggaaagttagcggctttgatactcatgctaatttattgaataaaaatgcaaaatatcaagaaatgtataacttacagaaaaatgcatatatttaatgttagaaaattcttcatgcaagcaggcatggagaatttttttgcgcctcaagagttaacatttttaagtgatttttacgttataatagaacataggtttttggaagaaaggatatttggtaacgaatggcaaaaaaagatacgacaccgatgatgaagcaatattacgaaattaaggaacaatatcccgatgcgtttttgttttatcgtgtgggtgatttctatgaattatttgaagatgatgcaatcaaaggcgcacaaattcttgaattaaccctaactcatcgttcaaataaaactaaaaatccaattccaatggcaggcgtgcctcatctagctgtggatacttacgttaatactttagtagaaaaaggctataaagtagcactttgtgaacaacttgaagatcccaaaaaagctaaagggatggttaaacgcggaattattcaattaattacgccaggtaccatgatgcaagagcggccagatcaagcaaaagacagcaactatttaacttctgttatttctacaaattctggcttcggtttagcctacagtgacttatccactggggaaactttttccactcatctagctgactttgaagcagtagcaaacgaattattgtcacttcaaacacgagaagttgtgtataacggccacttaactgacttaaataaggactttttgaagaaggctaacattactgtttctgaacctgttgaagttgaaggtgaacatgcagaaatttcttacgtagctcagaatttaactgatgacgctgaaattaaagctactaagcaattagttgcatatcttctttcaacccaaaagcgtagcttagcccacttgcaagttgctcaaagctacgaaccaacgcaatacttgcagatgtctcacacggttcaaactaacttagagttaattaagtcagctaaaacatctaagaagatgggttctttattttggcttttagataagactagtactgccatgggtggacggttattaaaatcttggattgagcgaccacttctttcagttacagaaattacgcgtcgtcaggaaatggttcaagcccttcttgatgattactttacccgtgaaaaagttatcgacagcttaaaaggtgtgtatgacttagaacgattaactggccgaattgcctttggttcagttaatgctcgtgaaatgctccaattagcgcattctttaggcgcaattcctgaaattttgaatgcactgcttgaaacaaataatccacatctgcaaaattttgcaaaacagatcgacccactaaaaggaattcatgacctaattgtcaacactattgtcgataatccaccgcttccaacgactgaaggtggattaattagagagggcgtttcagaacaattagaccgctaccgggatgccatgaataatggtaagaagtggctatctgaaatggagagtcatgaacgtgaagtgactggaattaataatctaaaagttggttataacaaagtctttggctactatattgaagttacaaattcgaataagagcaaggtgccaactgatcgctacactagaaagcagaccctaactaatgcagaacgttacattacgcctgacttaaaggaacatgaagctttaattttagaagctgaagcaaaatcaactggtctagaatatgatttatttgtaaagctgagagaagatgttaaaaagtacatccctgccttgcaaaaactagctaaacaaatcgcaagtctagatgttttaactaattttgcgacagttagtgaacaaaataattatgttcgtcctaactttgtgactgataagcaagaaattaatgtagttaatggacgccacccagttgttgaacaagtcatgactgcaggtagttatattccaaatgacgtgaagatggatcaagatactaatattttcttgattactggaccaaatatgtctggtaaatcaacctatatgcgtcagatggctttaattgcaatcatggcgcagattggttcttttgttccagctgatagtgcaaccttaccaatttttgaccaaatttttactcgaattggtgcagcagatgatttgatttctggccagagtacttttatggtagaaatgagcgaagcaaacgacgctttgcaacatgcaactaagcggtcgctagttttgtttgatgaaattggccgaggtacagctacttatgatggaatggcacttgctggtgcaattgttaagtaccttcatgacaaagttggcgcaaaggccttgtttgctacacactaccatgaattaaccgatttagatcaaacgctcaagcatttgaagaatattcatgtaggagcaacagaagaaaatggaaagttaattttcttacacaagattcttccaggacctgccgatcaatcttatggtattcatgttgctcaattagcaggtttaccacacaaggttttgcgtgaagcaacaacaatgcttaagcggttagaaaagcaaggcgctagtgaactgcaaccagctagtgaacaacttgatctctttgttcctgaagaagcgagtgcaccagcaatttcagatgatgaaaaagatgtattagatgagattcaaaatgtgtatcttgctgacaagacacccctccaagttatggaattagtggctcagtggcagcaggaattgaaagataaggactgagaatcatgagtaaaattcatgaactgtcgcctgaactaactaatcagattgcagctggtgaagttattgaaagaccagcgagtgttgtaaaagaattatgtgaaaattctcttgatgcaggaagcaagcgaatcagaattgactttattgatgctgggttaaagcaaattacagttcaagataatggtagcggaattgctaaagatcaaattgatttagcctttactcgtcacgcaactagtaagattgcgactgaacgagacctatttaatatttctactttaggatttcgcggagaagctttagcctcaattgcagctgtttctcatgtagaagtaacgacaagtaatgataatttaggtggcgtacgggcaattttttcaggtagtgaaaagaagcttcaagaggatgcagcttcgcctaaaggaaccaaaattacagttagcgacttattctttaatacgccagctcgtttaaaatatttgcgctctgaaagaactgaaattttaaagattgttgatattgttaaccgtttagctttaggacatccagacgtttcgtttaccttaactaataatggcaaagtcttgttaaagaccaatgggcgtgatgatttaaggcaagacatagctaatatttatggtcggcagcttgctgaaaaaatgaacatccttaagggaaagagcccagactttgagattagcggcttaatttctgatcctaatactactcggtcgaaccgcaactttatttccttattattaaatggacgctatatcaaaaactaccggttaacccaagcaattatggctggctatggcaataaattaagaccgcgtcgttatccgattgcagtagtaaagattgaacttgaccctcttttagttgatgtcaatgttcacccaactaagcaagaagtgcgtttgtcaaaggaacaagagttagagcgtctgttaactactagtatttctgaagctttagaacaaaataatcagattgattcagggttaaataatttattagcgcctaaaaaatcaactaatattgatcaattgaaattcaacttaaataaagatgtagttaatactgctcgtcctgttgaatttactccgcaagttgaacctgaccaaaacgctgaagtgcatgaaactggtgctaattttgttagcttagaccaggtgcgtaatgatgataaatatgtgattacgtcaacgtggaatgacaacgtaaatcaacaagtacaattgagtccttttgatgaagaaaaggatatgcaaggaaaagatgatagtattatctcatctggagatgaaattttagctaataatctacctgaattgacttatatgggacaaactaagtcttacttgattgctcaccatgaggaagatctgtatttaattgatcaggttaacgcatatcgccgtttagcttatgatcaaattcttcaagatttaaatagtgaaaatatttctcagcaaggtcttcttagtcccttaattttggactttagcaatgttgattatttgaaattaaaagaaaatctagaaaatcttcaagaatttggcttatttttagaagattttggtcaaaatagcctgatcttgagaacatatcctatgtggcttcagcccgatgctgaaaaaaatgtccggatgattttggacttatatttaaatcaaactgagcatgatatttctaagcttaaagcgcaaattgctggcgaaataactatgcgtcaaagtgctagaagaagaatgctcaatccagttgaagcacaagagttgttaaaagaattaagaaatagtagtgatccttatcaagattttgaaggaaaaataattattatccagttaagcgaaaatgatcttaacaagatgtttaaaaaagatgagtaggtaaaatgtttgaatatctcaagggaatagtaacaaaaattgatccagcttatatcgttctagatgtaaacggagttggctataagattctttgtcccactccttatagttatgatgaaaatcaacctgcaacaatttacgttgagcaagttgtaagagataccggaattactttgtatggttttttgtctttagaagataaagaattatttttaaaattattaagtgtttcaggaattggacctaagtctgctgtggcaattatggctgctgaagatactgattctttggctagtgcaattcaaaatggtgaagtaaaatacctgactcgtttcccgggagtaggaaaaaagactgcttcccagattgtcttagacttgaagggaaaactaggcgactatgtaaaaaaatcaactgctgctgccgatcttactccaagtctgcaagatgctttacttgccttagtagcacttggttatacccaaaaagaagttgatcgaattacgccaaaattagcaaaattacctgaaaacactgctgatggttatgttaaggaagcattggctttactacttaagaaataaaatttagaaattaattgatgatagggaagtgaaagatgtgaacgaggaagaacgaattataggagcagaaagtagtgaagaagatgaaacaatcgaattatcgctgcgtccgcaactacttgctcaatatattggacaagataaagttaagagcgagatgaaaatatacattaaagcagcaaaacaacgtgatgaagctttagatcatgttcttttgtatggacctcctggattaggtaagactactttggcttttgtaattgctaatgaaatgggggttcatttaaagagtacatccggaccagcaattgaaaaggctggagacttagtagcgctgctttcagaattgaatccgggggatgttctattcattgatgagatccaccgtttagcaaaacccgtggaagaagttctctattcagcaatggaagatttttatatcgacattgttgttggagaaggtcaaacaacacatgcagtccatgtaccgctacctccttttaccttaattggggcaaccactagagcgggtcaactgtctgcgccgctaagagatcgttttggaattattgaacatatgcagtactattctgttgaagatttggaaaaaataattcaaagatctagtgtagtctttaatacaaagattgatcctgaagcagcaattgaattagcacgtcgctctcgtggcacgcctcgtgttgctaaccgcttgcttaaacgtgtgcgtgattttgctgaagtaaagggtgaagaagctatttcgttagtaacaactaagcactcacttcatttattagaagttgacgatgaaggactagaccagacggaccggaagcttttaagaatgatgattgaaaactatggcggaggtccagttgggattaagacaattgcagctaatgtaggggaagatacagatacaattgaagaagtatatgaaccgtacttactgcaaaaaggttttattactcgaactcctcgaggcagaagcgttacacaaaaagcttatctgcaattaggttatccaccaaaagatgaaaagtaagtttttagttaagctaaaaatacggtataattattacttgaaagttaattaataaaaacaatgaggtgtaatactttgaatacatttttcttagcacaaagtgctgccggtatgaataatatttttatgatcattgcaatgattgcaatttttgttttcttctatttctcaatgatcaagccacaaaaaaagcaacaacaagaacgtatgaagatgatgtctgaacttaagaagggcgaccaagtaattatggttgatggtcttcatggtaaagttgattcaattaatgatagtgataagactgtcgttattgatgcggacggaatctttttaacatttgaaagaatggctattcgtcgtgttcttccaactgctgcagctcctgcacaagaccttaagtctaatgaagctaaagaagaaaaagttgaaactgaagaaaagactgttgaaaaagacagtaagccagaagaaaaagctactgatacaactgaaaacactaattcagaagataaataaagaacgtccgcaaggacgttttttatttttttattgtcatgactagtattgtaaaatagaattggtaaagttgatttttattaagtaggtagttagaatgaaaaatattccagttgttatgattatttttggtggctccggagatttagctcatagaaagctttatccagccttatttaatttgtatcaaaaaggtttaattcatgatcattttgctgtaattggtacagcgagaagaccttggagccatgaatatttgcaagaacaagtagttgaagcagttaaagaaagctgtgacaactttgatgaaaaagaagcaaaagaattcgcttcacatttttattaccagtctcacgatgtaactgatattggccactacattgccttgaaggaattagcagctaaacttgatgaaaaatatcaagcagaaggaaatcgaattttctacatggctatggcaccaagattttttggtacaattgctactcacattaatgatcaaaaattgcttggtagcggctttaaccgtttagtaattgaaaagccatttggtcatgatttagcttcagcagaaaagttaaaccgagaaattggcgaaagttttgatgaagagtcggtatatcgaattgaccactatcttggaaaagaaatggttcaaaatattatgcctctaagaatgactaatccaattgttaagaatatctggaataatgactatatcgcaaatatgcaagtaactttagcagaaagtctaggagtaggaactcgtggtggttactacgaaacatctggtgctttacgtgatatggttcaaaaccatatttttcaaattattacacttttagctatgcctgagcctaaaggacttgattcagaccatattcaccaagctaaacaagaattattagatagtctagtaattccaactccagaaatggttaaaaagcatttctcacgaggacaatatttagctgatgataatgaagtagagtatttaaaggcagatcaagttgcactagactctaaagtagaaacatttgtagctggagaagttaaattcaaaaagggtccagtagctgatgtgccaatttactttagaactggtaagaaaatgaaggataaggtttctcgcattgatattgttcttcaccatatgaataatttatacggtagcgcacattcaaataatatctcaattattattgatccaattagtgaaatttatttcacaattaatggaaagaagattacagctgaaggtttaagaagagaaaaccttagttataagttttctaaggaagaaatggagcaagttccagatggctacgaacgattgcttcacgatgtgtttgtagcagatagaactaactttactcactggtcagaattgaagcaatattggaagttcgttgatgcagttgaagatgtttggcaagatgaaaataaagatgttaagcagcttgaacaatatccaagtggtaagttcggtacggaatcaagtaatcatatttttgaaaaagatagcgagcactggatttaccgttaatggatttactgcctaaaaacaatacgagtcgtaagattattcatattgatatggatgccttctatgcttcagtagaaatgcgcgataatccatcaattagaaataaagccgtcttaattggtggagatccgaagaaaaataagggtcatggggttgtagcgacggcgaattatattgctcggagctatggagctcattcagcgatgccgacggctaaggcggtaagattaataccagcagagaagttggtaattattcaaccaaattttgaaaaatatcgtgctgtatcagctgaaattcatcaattgatgcataagataactgatcgggtagaatctgttgcgttagatgaagcatatttagatgttactgaaaataagcttaatttaaccgatccagttcgtattgctgctttacttcaggaacgaatctatcaaagaattggtttgactagttcatttggtgtctcttataacaagtttttagctaagatgggctcagaatatgccaagccttttgggagaactgtaattaaaccagaaggtgctcgcgattttttagcaaaacaaccaataaagaacttcccgggtattggaccaaagactcaagaaaaactggcagagatggaggtttataccggagctgatctaagaaaaattccaaccgatattttaattaaaaaatttaatcgaatgggttatcttatggctcagcatgctcatggtattgacttaagagatgtagtgactgattcggaaagaaatcgaaaatcaattgggattgaacgtacttttaatcaaaatttatttgatgaaaatactgccttaacaaaattgcggtcatatagtagagaacttgaaaaaagtttaaaggagcgccactttcttgcaaattgtgttgtcttaaaagtacgcgatgctaattttaagacaattactaaaagaaggaagctaaagcagggcactaatgataaaattgttatctacgatactgggcgtgctttgtttgcgacagaaaaaagcatgctttcaactggaatccgacttttaggccttacggtcactgattttgaagagcatcccgttgagaatatatcgctagaaatttttgataatgagtaatgataaaataaaaagaaaaatttaggagagagaattaatggcaacttttgatgaaatttatgaaaagataaaagaatatccaacaattattttgcaccgtcatactagcccagatccagacgcaattggttctcaagctggtttggctagatctttgagactagctttccctgataaaaagatcctttgtgctggtgaaaatgatgaaggtgacttaatttggattaacaagatggatgaggttaagccagaagactacaagggtgctttagttattacaaccgatactgcaaacactcctcgtatttctaacaaaaattatgacaaaggtgatcttttaattaagattgaccaccacccagatgtagatccatacgcagatatgagctacgttgatccagatgcaccagctgcttctgaaattatttttgatttcttaaaagcagaaaacttaccaattactaaggaagttgcagcagctttatatgcaggtattgtaggtgatacgggaagatttatgtatcctgaaacttcagctcatacttttgatgttgcagctgaattaactaaaactggaattaatattacggatattgctagagaaattgcggatgttacttttgatgaagcaaaattacaagctttagcaatggataagatggagattgatccagttggggctgcttatacaattttgatgcaagatgatttgaagaagatggggttaactgacgatcaagcaaatgttgctgtttcaactcctggtcgaattaaagatgttttagcttggaatgtatttgtagaaaagccagatggaactttccgcgttcattatcgttcaaagggacctgttattaaccatttagctgaacagcacgatggtggaggtcatgccctagcatctggagctaatgcaaaagacatggatgaagtaaaacaagtctttaatgaagtagtagaagtaacaaagaagtataaagaagaacatggcacaaacaagtagtatatttcaaaatgaaaaaatccggccagaactacaagccggattagaaaaaattaattttaagaaaccgactaaagtacagtcttcggttattccggcatttttaaataaaaagaatgttgtagtgcaagctgcaacgggatcaggaaagactcatgcttatttgattccaattttgaatatgattgatgagagcgcacctgtaacacaagcaattgttactgcaccgagtcgtgaattggctaatcaattgtataaagttgcgcgtcagttaagggatgctagtggtttaaatatttcaattgaatatttaggcggtggaaatgaccgtaatcgccaaattgaaaaggctgaaagcagagccccacaattaattattgcaacccctggtcgtttacatgattttgcatccaaaaaatttattaacttggagaatgtaaaggcctttattattgatgaagctgacatgactttagacatgggctttttaggtcaaatggatgaaattatgtctaagttggacaaaaaagcagtcttaggtgcattttcagctacaatcccagttaagctcgaaaactttttaagaaagtacatgtcaaagccagaatttatcgttattgacaatccggcaattattgcgccaacgattcaaaatgatttaattgacgtaggttcaagagacaagaaatcaattttgtataagttattaacaatgggacagccatatttagcccttgtttttgctaatacgaaaaagactgttgatgaattaacggactaccttgaagaacaaggccttaaagtagcaaaaattcatggtggaattactgaacgcgaacgaaagagaattattcgtcaagttagagagggacaatatcaatacgttgtagctagtgacttagctgctcgtggaattgatgtacccggtgttagcttagttgttaactatgaaattccaaaagatttagaatttgtaattcaccgaattggtcgaacaggtagaaacgggcttgaaggacatgctattaccttaatctatgatgatgaaatgagtcagattgaggacttagaaaaattgggtattcattttgactttaaagatcttagaaatggtgaattagttgaaagaactcactatcacagaagagataatcgtcaaacgcgtaaccataaacttgataaccgcatgatcggtatggttaagaaaaccaagaaaaaagtaaagccaggctacaagaagaagattaaacaggccattcaaaaagatcgtcagcaaaaacgtaagcttgaagaacgtcatcaaattcgaaaagcaaagcgtaaacgtaagcgtgaacgtgagcaagcacgtagtaattttgacaactagaaaatttgtagtaaaataaagcacgtttaggacatattattaaagtatttttttcaaagagaggactgcttggtgagaaggtctagaaaatatttagtaatgctacctaagttaattagagaaataaatatttaaagaggtaacaaacactgttgcaatcaaggtggtaccgcgctgggagcgtccttgttttatgcaatagtgttttttatatttgtaggagaactttttatgaaacaattgactagttcacaagtacgtcaaatgttcttggacttttttaaagagcatggccacatggttatgcaaagtgcatcattaattccacaagatgatccaaccttgttatggattaactctggtgttgctacaatgaagaaatactttgatggttcggttgtgcctaagaatcaccgaattacttcttctcaaaaatcaattagaactaacgatattgagaatgttggtaaaaccgctcgtcaccaaactttctttgaaatgcttggtaacttctcagttggggattactttaaaaaagaagttattccttgggcttgggaatttttgactagtccaaaatggttaggtcttgatccagataaactttatgtaactgtttaccctaaggatactgaagcataccacatgtggcatgatgttgttggtttacctgaagatcatattgttaagttagaagataacttctgggatattggtgaaggtccatgtggtcctgactcagaaattttctacgatcgtggtcaagaaaataacgatgtggctgaagatgatccagaaaacttcccaggtggagaaaacgcgcgctaccttgaaatttggaatatcgtattttcacaatttaaccacttaccaaatggtaaatatgttgaccaaccacataaaaacattgataccggtatgggattagaacgtgtagtatcaattattcaagatgctccaactaacttcgaaactgacttattcatgccaatcattaaggaaactgaaaagttaagtgatggcaagaagtatgccgcaaataaagaagatgatgttgcatttaagattattgctgaccatgttcgtgctgtaagctttgcgattgctgacggtgcacttccttcaaactcaggacgtggatatgttttacgtcgtttaattagacgtgctgacttaaacggtcaacgtttaggtattaaaggtgcattcttgtacaaattagtacctgtagttggcgaaattatgaagagccactatccagaagttgttgaccaacaagcattcattcaaaaagtaattaagaacgaagaagaaagattccaagtaactctttcatctggtctaaacttacttgataatatcattgctgaagctaagaagagcgatgataagactatttctggtaaagatgccttcaagttattcgatacttacggcttcccatatgaattaacttttgaagctgctcaagatgcaggtcttaagattgataaaaagggctttgatgaagaaatgaaagctcaaaaggaacgtgctcgtaaagctcgtggtaacttgcaatcaatgggttcacaagatgttactttgatgaatatcaaagataagagtgaatttgaatacggcactttagaagaaaaacatgccaaattaattgatattgttgttgatgacaagttagttgataaggcagatggtgaacatgcaactttaatctttgataaaactccattttacgcagagcgtggtggacaagttgctgaccacggtgaaattttgaaccaaaatggtgaattagttgctcgtgtaactgatgtacaacatgcaccaaatgatcaaaacttgcactttgtagatgttattttgccacttgaaaagggacaagagtatgtcttgaaagttgatcaaaaacgtcgtcgcggcttaaagcataaccatactgctactcacttattgcatgcagctttacgtgaagttttaggtactcatactcaccaagctggctctttagttgaaccagattacttacgttttgactttacaagcttagagccaatgactaagaaagaaattgctagtgttgaaaagttagttaacgaaaagatttgggaagaaattccagtcaagaccactgttactgacccagatactggtttaaagatgggcgccttagcattatttggtgaaaaatatggtgacacagttcgtgttgttcaaatcgatgacttctccactgaattttgtggtggtacacactgtgaaaatactgatcaaatcggaatgcttaagattgtttctgagtctgctgttggcgctggtactcgtagaattattgctgttaccggtccagaagcttacaagtatgtaacagaccgtgacgaaatcttgaaagaagttcaagatgaagttaaggcaactaaggctgaagatgtagttaataagatttcttctatcgaagatgatttacgtgcaagccaaaaagaagctgaacaattaaaggctcaaattaataaggcaaaagctggcgatctctttaatgacattaagcaagttaaagatttaactgtaattgctgcgcaagctgatgttgaaggcatgaatgatttacgtgaacttgctgacaactggaagagcagcaataaatctgatgttttagtcttagctgctgaagtgaatggtaaagctaatatggtaattagcttagatgataaggctattaaagcaggacttaaggctggcgatttgattaaaactgctgctccaatctttggtggtggcggtggtggccgtccaaatatggcacaagccggtggtaagaatccagcaggattaaaagatgctatcgctaaagtgttacaagaagttgaagaaaaacaaaattaattgagttcgttcgatatttcaagtaaaattaagaagaataggaggaattttattatgagttcgctagataaaacaatgcattttgactttaaccaaaataagggtaagaatgtatacgatactctacaagacgtatacaatgcacttgaggaaaagggctatagcccaattaatcaaattgttggttacttactttcaggcgaccctgcatatattcctcggcataatgatgcacgtaatttgatcttgaaacatgagcgtgatgaaattattgaggaattggttaagagttatttaggtaaaaataaataatgcgattacttggacttgatgttggctctaaaacggtcggtgttgcaatcagtgaccctttgggaattaccgctcaagagcttgaaacaattaagattgacgaaagtaagtttagctttggtctgcgtcagattagaagaattgtacgtaaatatgatgttgaaggctttgttttaggtttacctaaaaacatggatggtagtagtggacattcggtagaaagaagtaaacagtatggtgagcgcttgaaagaaaagtttgacctacctgtttattacatggatgaacgccttacaacggtgcaagctgatcgaattttagttgaagaagctggcgtccatgatcgtgttgaacgaaaaaaagttattgaccaaatggctgctgttttaatcttgcaaaactatttagaagcaaccagaaaggataattaaaatgagtgaaaaaattaacgctaaccaagataatgatcgtcaaattactttagttgacgaacaaggtaatgaagaattatttgaaatcttatttacttttacatctgaagattatggtaaatcttacgttttactatatccagcagctgttagtgacgatgatgatgttgaagtacaagctttcagctatgatgcagatgcagatggcgatgtaactagttctgacttacatgaaatcacagatgatgatgagtggaacatggtacaaggagttttaaatacatttttgtcagacgatcgcttaagcggcgaataatcttcaaaaaagactggcgattgaagctagtcttttttgcttaatcaaggatgagcaatgatttcttttttcattttattaatttttatctattgttgttatgtaggctatcggcgtggtgtagtatatgaaggcttagcagctggtggatatgtaatcgggctaattttagccactttattgtataaaccatttagtaactttttaaatttgtgggttccatatccatccgcaaatgatcgaagcagctttgctttttttgataagactacgggattaaccttagataaatcattttatgcagcaattgctttttcaattattttgttgattgtttgttgcttatggcgttttgtgatgctagggtttaatcaattaagatatgttacggtaaactctaacctaaatctctggggaagtttaattatttcttttattgtgacacagattagtgtttatttgcttttgtttattttagccacaattcctaatgatggtttgcaaaatatgctggggcattctattttagcaagtggtatcttgcatttttctcctggaatttcccaattttttataaatttattcattacaacaatataaaaatggccccaactctggggcctttttgctaggtggaatatatgaactctaaaattattgaaaaattagaatataatcgcataattaaacaattaagtgatttggctattacagtacctgcaaaagagcaggctttaacgttaatgccaagtagtaattttgatgaagtaaaaaaatcaattgatcaaactagggtcctttctaatgttttacgagttaaaggaccaatgccgataactgactttaaagatgttagagctagtttgaagcgtttgaaggtcaaggcaaatttaaatggtgaagaattaggtaatatttttctaattcttagcttagctaaagatgtttctcagtttactgctgacttagaagagcgtgaaattgatacccgtccgattgaaaaaactcttaaaaatttagcaattccagaagacttatttaagaagttgaatcaggcaattgaatatgacggaactgttaaggatacagcttcttctaagttaatgcagctgcgacatgatattcaaagcaatgaaactgatattaaaaatcacatgaatgattacatcagtggaaagcatacacagtatttgtcagaaaatatcgtaactatcagagatggtcgctatgtattacctgtaaaacaagaatataagaataaattcggtggagttgttcatgatcaaagtgctagtggacagactttatttgttgagccacaagcagttttagttcttaataaccgacagcaaaatttaatggctcaagagcgtcaggaaatccaccgtatcttaattgaattgtcagaacttgctggtatgtatcaaaaagaaataaaaaataatgcggatgcattaacacaattagactttttaagtgctaaaagcaaattagctaaagcaatgaaagctacagaaccagtattaaatcaagatcatgtcattaagttgagaaaggctcgacacccattaattgatcctaaaaaagttgttcctaataatattgaattaggaactagctttgataccatgctgattacgggacctaacacaggtggtaagacaatcacgctgaagactttagggctgctccaattgatggctcaagcgggattattcatcacagctgaagaaggcagtcaattaactgtttttaatgaaatttacgccgatattggggatgagcaatctattgaacagtcattaagtactttctcatcacatatggaccaaattataaaaataatgaaagatgtaactgaggatgatttggttttaattgatgaattgggagccggaactgatcctgaagaaggagctagtctagcgatcgctattttagatgatttacggggagcacaagctaaaattgcgattactacacactatccggaattaaagctttacggctataatcgtgcaagaactacgaatgcctcaatggaatttgatttaaagaaacttgctccaacgtatcgtttgagaattggtatccctggacaaagtaatgcctttgccattgcacatcaattagggatgaatgaagttgtagtcgacaaggctagaagtttgatgaatgacgaagatagtgatattaataagatgattgaacgattgacggagcagactaaggctgctgagcaacttcatgaaactttaaagcaaaatgttgaccaaagtatcactcttaagcgtcaactccagaatggtcttgactggtataatcaacaagtacaaaagcaacttgaaaaagctcaagaaaaagctgatgaaatgcttgctaaaaagcgtcaaaaagctgataagatcatcaatgatcttgaagaacaaagaagagctgggggtcaagttagaaccaataaagttattgaagctaaaggtgctttaaataaacttgagcgtgaaaatcaaaacttggcccagaacaaggtcttgcaacgtgaaaagcggcgtcatgatgtaagtgttggtgatactgtgaaagttctatcttatggacaacaaggtgtaattacgaaaaaacttgctgatcatgaattcgaagttcaaattggtattttgaaggttaaagtcactgatcgggatgttgaaaagattagtacacaagctgctcctaagaaggcagaaagagcggttcgctcgagtcgtgaccttcgttctacgcgtgcaagtagtgagcttgacttaaggggacaacgctatgaagaagctctaactaacttagatcgctacattgattcttccctcttagccggtttgaataccgtcacaattatccacggaattggaactggggcaattagaaatggtgttcaacaatacttgaagagaaacagacacgtaaagagctatagttatgcgcctgctaaccaaggtggaactggagcgacaatcgtttatttacagtaagcaatatacttgcaaaaagtaagtaattctactaaactatacttataatttaaagaatttatttgtgaggtaataacaatggttgatgaaattacagatgcaacttttgaagaagaaactagcgaaggcgttgttttaattgatttttgggcaacttggtgtggtccatgtaagatgcaatcaccagttattgaccaactttctgaagaaatggatgatgtaaaattcaccaaaatggatgttgatcaaaaccaagaaactgctcgtaacttaggaattatggcaatcccaactttattaattaagaaagatggaaagattgttgaccgtttaactggttatactcctaaggaaaaacttgaacaaattttagatcaatatactgactaatataaataaaaaaaaccgggtaagcctctgtattgagacttacccggtttttattattgctattctcttacttggttaatagttagtcagattgcgcagtgatttgaactacgtgctttttagtaacagtagctgaagcttcagttggagtaccattttggcgctctaaacattccgcaataattccactttcaagtgaaaattcatcactttggctatcaagcctatcagttacgacctggccggataattcaaaaactgcggtatgtttgcgatctttaagtacttttaaagttccaaattgagccatatcaaaaaattcgattaaatcatcgatatctgataaatcatatttacgactaacatgttttccggcccagtaaagaatttctttatcttcgctacctaaaatggtaggtaagataaaatcacgatataatgaatttaaaaaataaagatgttcgtttgtatgttccatgctttcatttccttttgtcttctatatcattttaacttaaaataggtggagtagaaaagagaatttaatcatcatttatttaaaggagtttttttaatggataatcgaccaattggagttttagattcaggattaggcggcttaaccgttttaaaaaaagtaattgaaaaaatgcctaatgagtcaacaatttttattggcgaccaggctaatatgccgtatggggatcgctcaagagaagaaattatttctctaactcgcgatagtgtaaacttcttattaagtaaagatgtaaaaattattatttttggttgtaacacagcaaccgctgtagcaatggcaactattcagaaagaaataccactacagataattggtgttgttcaatctggtgctttagctgcagcaagaactacagaaactaaaaatgtagctgtaattggtactaaggccactgtggctagtcattcttatttaaaagaaattcagtatcgtgatccagaaattaaggtcagtgaatttgctcaaccaaaattagcgccactagctgaagaagatcccgatgaagatactaagaatgcagtggttagcgaaagtttaactccattgaaaaatgctgattatgataccttagttttaggctgcacacattatcctttattgagagacgaaattgtggctgtggtgggtcaagataaaaaaattgtagatccagctgatcaagtggcacaatatacatataatgttttgcgacgtgatgatttatttgctgagagtactgctccggtaaaacatgactactatacaactggagaagcaaagaagtttactgaaattacccgtcaatggatgaatgatgacacgatagttggtcatcatgtagatgctgaggattaaaaatggatactttattatttgcaactaacaataaaaataaggctagagaagttgaagaggccttaaagaaaataaattttcccattcatgtaattactaatcaggacctaactgatcctccccatgttctagaaactgggacaacatttttagctaatgcaaaactaaaagctcataaaatggcggagttcagtaatttaccaactcttgctgatgattcaggtttatcagttgataaattaaacggagctcctggagttcattctgctcgctacggaggcgaagctcataatgatgccttaaataatgcaaaattattggctgaactaggcggtgttccccgagagaaaagacaagctacttttcatacaactatggtagtttcgtggccaggtagatttgatgatgatttagtaacacaaggtgaaattagaggcgaaattttaacttatccgcgaggggatggagattttggctatgatccacttttctttgttcctgataaggggaagacatttgctgaaatgacagtagatgaaaaaaatgctatttctcaccgtggccaagctttaagaaaattacttgctgagctgccaacttggtggaaaaaaatggaaaatgaataattaagagtgacttaaaagacttagttctgatattttattggaattaagtcttttttatataaatacatattttattatatataatgtggtattaggccttttttagcgttaaaatacctttgataaagggaagtttttaaggagattgaggccacatgttattcaataaacgtgacttagatacaaaacaaagatttagtataagaaagttaactattggaacttgttctgttcttttatcaactttatttttaggaataggtactaatgaagtagttcatgcagatactttacctaataatgttcaagaacagaatgcacaaactaataaaaatgatgctcaaaaagatgaagtaattgatgctagtcaagttcaagattctaagatagagggatctaatcaagctcaaaaaggtattacagattcagaaaagactgcagataagaatgcagtccaaaagtctgatgaaattaagaaggatgatgtagagaatactacagttcctactcaaaatagtaatcaacagagtacaactgccaagtctgcagaaactccttctattgttcaaaaaactgaaacttcaaagcctgattcttctattcctcaaactaaaagtgaaacagattctttaaatcaaaaaaataatgctaatgctgcagctcagaatactactacacttaatataagtaacgttgctgctaaggctaatgttaatgctcttaaagaaaataagactgtagcagcaaccgccaccacacctactacaaatggtggctatgattctgctacttggggaacattagatacgtccaagtggaccggacagaatacaacctttgatggaactgattactaccaattaactggttataccggtgatcaaactcatattattgtgccaaatcaagctgactttgagcaagctggaaaatcaactaataatcttcaagtatcgatctctaatgatttaattaaaagctggcaaaatgctgctactattgcctttagtaagactgatgataagaagattaagcttataagtactaatttagacaatactttcaacaagaatactactttgaccaatttagatgccaacagtttagacacaagtagcgttacttcgatgcaaagtacttttgaaggtgcttctaacctatcatctttgactggaatcagtgactgggatgtttccaatgtaactaatatgtcccttttattccaaaatgcgactggcttgactagtttaactggtttgaaaaactgggatgttcaaaaagttacgaatatgactcggattttcaaccaggttaccaaagttacagatctttctcctttgagcaattggaagactgatagtttacaaaaacttaacactgcatttgctaataatagttttacgaacttacaaggtctagaaaattggaatgtaagtcatgtaactgacatgggtgtcatttttatgagtgatgctaatttgactgacattagtgccttagctaattgggatactagcaatgtgactgatcttaatcgggcatttaatgttaaccaatcactaactagcctgcatggtttagaaaactggaataccagtaaggtaaccaatcttaatgcaacttttgccaatgaaggatcattggttgatgcaagtgcgattgctaattggaacacgagcaatgttaccaatatgtcagttttgtttgctgattcaagtgctcagtatgttgatttttctaactgggactttagtaaggtgactagtgcatcgaatgtcataaataatactaagtcagtcgtttatctcggtaataactctacccttactgctgataagttaaacaccttgggtattgccaatggtggcttcactcagccaatcattttagctagtggtaatctctatactcttttatccaataaaaatagtaatacacataatattactattaataatgccagtggtagccaacttactactatttctgcacccgttgtttatgatgcagctagcgcaagtaacatgaccgatgccattaatagttacaaagacatggttgatcaaaagcttgaagattatgttactgaacataactatgtactaaagagagtttcaagtgcccctgttgatgatgtcacgggtcacaataatcatctagttaactatgcgaatgctacataccaagttgttactattccagcagatcaaaagaaaaatcttcagattcaagataagactacctataaagggaagactttaacagctaaagatttagttactaatgttgctgattttccagcaggtactacatttgaatttgctgataatagtgaaccaaattgggatcaagtaggaacctataatgttaaagttattgcaacttatccagtttctgtaaatggtcagcaatacacggccgtaactactccagctactgccaaggttactgttactcaacaaatgcagtttacgattacttactgggatgatacggaaaataaggaaattactcaatttgatatagcaaatgctggtaatggggcatatacttatctttcatttccaaaaggtataaatccaaacaattatcaatccgtcagtgtctctggggtgcctgaaggagcaacaattgctggggatttctggaagccgtttacagatccaagttgtaattggacagtaccaaattataagtgggatgcgacggcagctccttcgttatttgatgctaatgttgttgtccacttaattcataaaacacaagacgtaaccaatacggacccaggtgcacaagaaacacgtacggtgacggctgatttcgttaagattaatgaaaatggtacacccgaagccgcaccttttgattcagctactttagacgtttactacattcgcaaagctactaaagatttggtaactggtaaagttacttatggtaattggaaattaaatacaaataagggtaccaatggtcttcaagtagttagtggagcttggactttaccaacagatagtagttccaagattactgtcactgctcctgatcttgacggctatgaaaaagcggattctctagttaatgggcagttaactacgaactttggtacggttgataatatcaccagtaaattaacgacttactatgtacctacatcattgacacaaaaaactattaaccgtgtaattaacatgattgggatcgataaatctataaacgggtctgcaatggtcaaaccatctaccaccactcaatcagccacgattactagacctgttaaagtaaatgctgatgatagtggagtaacatttgatggctttgatgggagtggctggactacaggtaagtggggacgctacaacaatataccggttcctaataattatacgaaagtcattaaacaaattgttacgcatcctgatggcacaactactgaaacaacgttagatattcctaagtggagacctattccagctcaaactgtcactatcgatacccttccgactgtaattaatataacctatacggcaactgcaacagcatttttggcaggtactagtgagtcaacttatactggcagtccaatcactcttgatgaccttaatgatggaaacggtgataatccaatctatgctgaagttacagggccaacaggaggccgctatactttacaggctggagatgttgaattttcatctgataatggtaaaacttggacgactgaaatgccaactaatgcaggcacctatgaattacgttggtcacaacaaggtaagcaggatgttataaaagaatttggtaataacagtattaaatgggtagatgctcagggtaattcaacctttaccagtactgcaacctatattattaatccggcaccagctactttcactttaagcaaccagacatctggaaattatactaagatctatgaggcccaaccaacgactagtatcgatccttcaaaattaacaattactgttgactttaacaatgccaaagtagttttagatacgactggcctcaccagtgatagttatgagtgggtagatgctcagggtaattcgatcagtaatcctgaaaatgttggaacttactacataaaacttaaggacgctgcactatctactctacagaaggataatcctaactttactttgactaatagtaataaattagctgagtacaccattacgcaagctcaggcaagtggtgtattaagtggctctaactcacggacatacgatggtcaagctactacacctgctgaagtaaatagcaatggtcaaattggcgtaacggtaaccttcccaggtgttactgatgctaacaagacctatattcttaaagatggtgactacaagtggagtagtggctctgcaccaactaatgctgggtcatatacgattactttgacacctgatggtatttccaaccttgaaaaatatattcttggtttagcaggttctggtcaaaataacacaccgaatgtagtattttctgataatgcctttactggaagtgcaagttatacaattaatgttgctgaaaatactgtaagtgtcgatggaacccaaacagaaacttacaccggtcaagaaattagcgttaaatacaacgcgaatggcactaacagcgttcaagtaagtattagctctaaagatggagcaaccgctagcttaagcaatgtacagttagattctggtgatttccaaattgttgatgtcagcggtaagcctatcattgcaacaaatgctggtggtgtttatcatattgtcttaactgatactggtgttgcgaagattcaacaagcggttggtgataattacaagattagccaagggacgagtttcggtactttagttattaataaggtccaagcatctgcagaatttagtggcaatccttcgtacacttatactggtagccctaatagtgattacttaaacggcttctcaattaagctgaatgaaccaaataatccaacttataacttagttgctggtgatattgaatttaatgttgatgggacttggactactgctgttccagttaatgttggaaaatatgaagttcgcttatcacaagacggttggaatcatatcaaagagattaatagtgataatgtaacttggtctgccaccgcatctagtggaactggtacttacaccattactcctgctagcgctaatactgaacttagcggtcacaattcgatggtttacaatggcagctcagtaacgacagctgatttgtatactgatggttcaaccatcgaggtagctattagtggtaataatattgttaacttaccaactagttttactcttgcagatggagactatacttggaatactccagatggtaaagcccctgttaatgcagggtcctatactctgactctttctagcgcaggtcttgataaaattcaagctgcaattgatgaagcagttggtaaaggtaatgttatcttgtctaaggacaatacagggagtgccactttccaaattacacaagccgtgtcaccagacgttcagttagatggtaacgaaaagagtgaatacaatggtcacgcagtcagcttcgatccaaataatgaagaaaccaagaagaactttggcttcaataatgttcaaggtttgactattccagatttaactgctgatgactttgaatgggtcgatcaagatggcaacccaatttctgcaccaactgatgcaggttactactacctccaattgaatgaaaaaggtaagtccgcttttgcgaatgctaaccctaactacacatttgttaaggatggaaatagtacgatttcagggcgcattacttaccacatttatccagcaagcttgattatcggcgtaagtggaactgcatcacaagtttataatggtcaaaatgcagccattacccaaacacagcttgataatggtgatattaaattagtgtggggtaactcaaatgatgagccaattggattgggaagcttcactttaaccccagaagatttagaagtggttgatagtgctggtgatccagtcagccatgctaatgcgcaagaaaacgataaagtaggcaatccaacttattatgttcgtctaactaatgctgcgcttaataaaattaaggccttaacaggtgcaagtaattatgacattagtttaagtgaaactactggtaatttcttaatctatgctcgcaaggctcaagttactttaagcggtaatcaaactaccacttacgggactgatttagctctcgacccaagcgtctaccacattgaactaactaattggaatagcagtgttcctgtgccaactgatgctgaaattattcaagcaattggtgggttgaagtctggggatgtctatattaatggctttactaatggtcaaatgccagtcaatgttggctcttaccaagttaagattactgatcaactactgcaaagactccaagcagcttttccagactatgattgggatgctgttagcgggaataatggcactgctagaagtgggtcgtctgattcagatcctattgatgctagacatgaaccagctacatatgtaattacaccggctgatactacggttacgattaatggcgcagagcacattaaatatggtgaaaattcgacgattcaatatggtagcgataatggttacagtataactattactgcacctgtcaagaatgcaacaactgacaatgaacatgagccaatttatacagatttgaagcttgaaacaggcgatttagagtttgtaactactccaggtaatgttggcacttatgaagttaaattatctgctcaaggattgaagaagctccaagctttaactggttcaactaattataattggactcaagcttctgaagcacgagcaaacttctttgttgaccagatgccagtgacaattaccgttggtggtaatgagcaaaacgtaacttatagctccaatgattggttaaaggctattaaggagaatcctcaaggttataccttaactgtgatgaccgaaaatggtactactttaaactaccaagctaaagatggagatttgatttttagtcaaacaccaggagatgttggtagttatcaagttgttctatcagctcaaggtctggataatatcaagcaggcactgggtactaactatgcttatccacaggccgcaagcgatgtaactacttatggcacctttaatgtgaaccaaggcgaagtcacgatcagcttagatggtagtgatagtaagatctatgatggaaaaactactgtaccagctgatttgaatattggtaaatataatttaacttattcagcccctgtttatgctccagacggtagcccacaaacaattaagttaactagtgatgatttgcagtttgctaatggtgatcctattaatgctggaacttatacagttgaattatcaccagccggtcaagctaagttgaagaatttaactggcaacaatggcgataactacaagtggatatttaacacccaggcaacttacacgattaattcagctactgatgctagtgcaagcttgtcaggttctaaccaaatgatatttaatggctcgccagtaactacggctgaaattaacaatggtggtaacatcgttgttaacttgaatttccctggtagcactgaaaatagcatttaccacttgcaagatggtgattatatttggaatgatggagctgctccaactaatgtaggtacttacactattaagttgacccaagctggtttggctcatttgcaagctgcaattgaccaatatgctggttcaggaaatgcaaaaattagtgcggatagcttaactggttcagctacttttgaaatcgttcctaagtcaattactgatgtcaccatctcgggcaaggatcaagaaaagacttacgatggtcaggctgctagtttagatgtaaatgacttaacgattagcgctactaatcttgttactgatagtccattatcaatgaaagacattactgccagtgattttgattggtatgatgcccaaggtaagaagctagatgcgattccagctgatgctggcacttatgaagctcgtttgaaaccttctgctttgcaagcattacaaaaggataatcctaactacagttttaataccgcaagtggaacgattaagtacacaattaatcaaaaagcagctactgatactttagatggaaatggtaataaggtttacaatggtcaagaaactacggttagtgatgttcttaattcaattacttggacgccaagtgggatagttgatggccaaagcttagatctttctaagctaagcgacgctgattatgcttggtataccaagaatgcagacggtacatacactgaaatggccggtttaccgactaatgctggtacttactacttgaagcttaaggatagttcaattgctaaaattcaggtagctaaccctaactacagttttgccactggtgcaattagcggtgagtatacttatgttattactcaagctaatgctgtgattactttgccaaatactagcgatcaaactgttacttggactggtaatccggcaacaattgatcccgctaactttattccagaaatcactactgataatccgaatgaaaagaccatcgttttgccaagtactttgcaattgactgcaagtgattacgaattctcacaaaatggaaaagtgatttctgcaccaagcgaagttggaacttatcaagttcgtttaaccgaagctggctggcaaaaagttcaaaatgcgattgctgaaaataccaactatacttggaattaccaaggtgaaggtaattatcatattgaaaaggctactgcaaacgttactcttgatggttcagcttcaacaatttacacaggaaattcagtagtaattccagctactgctggagttgttaacggcattaatgtgaagttatcaaatggccaaacttatgtcttaaaacctgaagatcttgaattcgtgaatgatcaaggcaatcaaattcctgcaccaactgatgcaggtacttacaaagtaagattaaccaagatagccttagatcaaattcgaaatattgaaagcaaccattataactatacttataataatgatgcggtagactttacaattgaaaaagctaatgctgatgtaataacttcaggttcatatgatgtagtttacaacggccaaactcctgagattaatgttgatatgattactaacactattgctacgaacaatgatgtaaagcttactgcaccaactttaactgctgacgactatgaatgggttgatgaaactggtaaggtaattactgatcctgtaaatgtaggtacttactacttgaaactcaaagattctagtcaaagtaagattgctaataatagtaattacatttggaacttcaagggtttagctagtgtcacaattagtaaggcgaatgcaactattggttttaatggtaatcaagaaacttcttatacaggaagtgtcatagcagtagatcctgataaatttgaagttaaactttctaacggtcaaacttaccaattgactgacaaagatattcaagttatcggtaatccaataaatgttggtacttacaaagttgagttaagccaagctggaatcgattcaatcaaggcagctgatagtaattacaactacagttatgatgacagtcagggagtgctagtaattgttccagctaaggctagtgcaactataagtggttctcaaactactcaagacttagaacttgatcctcataactactcagttgttttaacgttaaacggacagcaacaaactattactgggttaacagcaagtgattttgtcttcagtaaagatggtcatccggctcaattaactgaagctggaacttatgacgttgagcttagtggggatgcaatcaataagattcgtcaagaaaatccaaattacaatattgacttcagttcaacagcgacatttactttggaaaatagtagccaaactattaactatgtggatgctgataataatgtaattggttcaactaatattagcggtcacattaagggaactaaactaccatttactcctgaaattccagtaggttgggtagcaagtgatccaagtgatgtaccaactgaaattaccattaataatggaactactataattaagattaaacatggaacaactaatgtagatcataataatccggttcctgatggtgcaaagactgtaacaggtgaagtaattgatggtgctcacgcaagtgacttgaaccaaacaattactcgtacaatcaatgtaactaacccagatggaactaagagtacagaagttcagaccgcaaagatttatcgtgatgcaagttacgataatgtgactggtgaagtaacttatggagaatggtcaactggaagctggaaagaatttagtccagcagagatcgaaggttacagtgcaagtgaaaaagtagttccagctgtcgaagttaaagacggtcaaaagaatgtcacagttgatattacttacacagctaatgaacaaagtggaataatttcttaccaagacgaagcaggtaaagaaattagcactactccacttagcggtaagactggtgaaacagtaacagttaacccagaaattccagcaggctgggaattagttccaggtcaagaaattccaaagactgtcactgctacaggagagggaattccaactgtagtaattaagattgaacatggaataaccaatgttgatcataataatccggttcctgatggtgcaaagactgtaacaggtgaagtaattaatggtgctcacgcaagtgacttgaaccaaacaattactcgtacaatcaatgtaactaatccagatggaactaagaatacagaagttcaaaccgcaaagctttaccgtaatgcaagttacgataatgtaactggtgcagtaacatatggagaatggtcaactggaagttggaaagaatttagtccagctgagatcaaaggctacaccgcaagtgagaaagtagttccagctgtcgaagttaaagacggtcaaccagatgagactatcaatattacttacacagctaatgaacaaagtggaataatttcttaccaagacgaagcaggtaaggaaattagcactactccacttagcggtaagactggtgaaacagtaacagttaactcagaaattccagcaggctgggaattagttccaggtcaagaaattccaaagactgttactgctacgggagagggaattccaactgtagtaattaaggttgagaattcaactattattgttactccggaaacacctgaaaaagatattccaaatggaaaagtacctggcaatccaagtaagaactaccctgaaatggaaaaacttgaagtggctccaactcgtgctatcatccttataaaaccagatggtagcagagaaaacattatccaaaaggtaatctttactagatctgctacattcaatgaagtaacaggcgaaataacctatagtgcatggaaattaagtaattctgatgatcatgaagctctctgggaagcttatgaaccaatgagtatttcaggatacacggttatgaatgtaaaccaagaaaaggttacgccggatacacctaatactcagctagaagttacttatattccgattaatcgtcctgcagtaactgcaactcaaacaattcattttgttgatgaaaaaggtaaattagttgagagtaaaatctacactggaaaattcggtgaggttatttctgttagcctatcggttcctaagggttacagtttaaggaatggccaatcattaccaacacaaattaccattgaaaatggtatgataaccattaatctaaaatcagaaagtaagcatcctattcctaactctgagaacaaacagaaaccttctgtaacaccaaatactcctgatgctcatactgataaaaataatttatcttcaaaagataataaagttgttaagtctcatggagaaaaattaataaatactaaccatgttgaccacgttgttattaatcaaaaagccacaagaaagggcacaaaggcttcatcacaaacttatggtgaaaagcactttgaaagcagacatatgcttccacaaactggggcacattctgaaaatccaatttttacagctttaggtatgttagcagtaggcttaggtttattcggtttaagtgatcggagaaagaaaaaggataaatagtaatacttggttactgaaaaattaaaggtaaaagagtaacgaaagaagcaagctaagttagcttgcttcttttttattatttaacatatagataataacttttgtttatgaaagcgctatacttagaatgaaagaatagttatataagtttaagtagatttcgaggttatagcatatgaaaaaagttctggcaattaattctggaagttcgtctttcaaatataagttattttctttccctaatgagaaagtaattgcttcgggaatggccgatagagtaggaaaagaaaatgctgtctttaaaattaagttgagtaatggtcaagaatatataaaaaatctgcctattcataaccaagaagaggcagttaaattattaattgaagatttaaaaaaatttcacgtagttgaagatttgcgagaaattagtggtgttggtcatagagtagtaaatggaggagaaattttcaaagaatcagtccatgttaaagaaaaggaattacaagaaatatttgatcttggagaactggcaccgttgcataatattccagaagcaaatggtattaaggcatttatgagaattatccctaatgtacctcaagtagcagtttttgatacttcatatcatcaaactttagatcagattcactatctttactccattccttatgagtattatcaaaaatacggtattagaaagtatggtgcgcacggaatttcaatttcctatgtggcacaacgtgcggcaaaaatgcttaataagaatcctaacttagttaatttgattgtttgtcatttaggatctggggcttctgttaccgcagtaaaaaatgaaaaatcttatgatacttcaatgggaattagtccacttactggggtaacaatgggaactagaagtggtgactttgacccagctgccttacaacgtttaatgcataaaactggaatgaatatcgatgaagctgttaaagttttgaactataaatcaggattattggggatttcaggtgtatcttcagatatgagagatttaattgagagcaaagataaacgtgcaacgctagctcgaaagatatttattaatcgtgtagttaggtatgttggtgcatatgcagctgaattaaatggtgttgatgcaattatatttactgctggaattggagaacatgatcctggcattagagccggagtgatggcatcattaaaatatttaggactagatcctgattttaaagctaatcggacagatggagaaaagtttatttctaaacctaattcaaaagtaaaagcaatgattgttcctactaacgaagaattaatgattgctcgtgaggtagtgcgagttttgcaataaaaaaagattaagtaggattagacaaaggtctaactacttaatcttttaagaagtagtagtattttcttgttttgtaggtagggaactaaattttatatcttgttgattgaactctttgatataagcgctcagataagcattttttacctggctttgactgttagccactacttgaaaatgaatctggtaagtaatacttgaaccagtttgattgataatgccaataatttgtgggccctttttaatttgatttttaaatttatctttgagtgctgcatttactgtgttaattgcatggttaacggttgtaagatcgttatcaacagataaattcaaattaatgttcatactccatccagaatgtgaaccatgagttaaattttctacaatagtaatattgcgattgggaatatagataactgccccattggtagttttaagacgagtattacgtaaagtaaaagaaagaacagttccagtataggttccaatcttgacagtatcaccaatgttatattcgccctcactgagaatatttattcccgttattacgtcacttactaggccttgtgctcccattctaaagcaagagaaacaagtcccacactagcgataagagtgccaactggaatacctagaagtgttaaaagactgtataaataaaacaaaagaattgtatattgaaaaagagcaacaccaagttgagctaaggttctttttcgaccagtcatgtgttcttgaaactttggatttttcagtaagtagcgagttaataagcgtttacctatacgccaaatcaagaaaaagattccagttgtaattagaatttgagtaccacgacttaagagtgtatgaagtacactattccaatcaattagagaatcaacattactattttttttagttgtagatgttccttttaaaatcgttgaccagttcaaaacatcatctccttagcaatttctttagatagtatatcaaaaagtaaggtactatttcattgcttgaggggaggaataatgctagactttttatgagaggaataattaatggaggatagattatgtcaatttcatatggtgcattagctggcttgattgcagcagtagcctttttaatcttagtcttatttactttgcctttaattgttagagcaactaagacaatgaagaaagttgactcaactatggatagcgttaatatagcagttgatgacttaactaagcaaactgcagtattgatgaaacaaagtgaagatttattagaaaaaagtaatgctcttctagccgatgtaaatggtaaagtaaccgaattagaaccagttgtgaaggcagctgcagatttaggtgaaagcgtgtcagatattaattcttcatcaagaagaatgattgagcgcttctctggtatgggtattagaggagctggaattggcatcttttcatctctagttagtcgaatgttcgcaagacgtaagcgtcgtcgtggggaagactaatatttattaaaggagaacaattatgcgtaaattaggtggatttttattaggtagcgttgtcggtttaggtgttggcttgattgctggctcattattattaccagaagaaacaactgatgatgtaaagaaaaagctagctgaaaacgaaaagttacaagacttaaaagagaaatatgataagggaactgaagcaattaagaaccaattagcatcattccctaaatcagttgaagatgattcagaattgaaagattttgatgatatcgtaattgatgatactaacaaagatcttggtgaagatgaaaaatctgacaaagaagctgttagtgatctaaataacgctgaaaaaaattaattaatattaaagaatcaagttttcacttggttctttttttgtataaaaaaactggtgatagagataaactatcaccagttaatttagtataaattagtctttaacgggaatgtatttcaattctttacttgttttagtaaaagtctcaaaaccattctttgttacaacaccacagtcttcgattctaacaccagctacgttaggaatataaatacctggctcaattgagaaacacatgccttcttcaagaacaacatcatttccttccataatttgtggaaattcatgaacgttcatcccgataccatgaccaagacggtggatgaagtattcaccatagcctgctttagttatgatatctctagcaacagcatcaagttcgctagctgtaataccaggctttgcggcttcaatcgctgcttgttgggcttcacggtcaacttcgtagatttctttttctttagcagttggttctccgtaagcaacagttctacttgagtcagaagcatagccattatgcattgttccaaggtcaaaaagaactaattcatttggttcaattttgttcatggttggaccaagatgagggttagcagcatttttaccagcttgaacgattgtttcaaaactagtgtgcattacacctttttgaagttttaactggtaatcaatttgaccagcaacgtagcgttcagttacaccatttttaagggcattaaagccaatttgaaaagcaaagtctgcttctgcaccagcagcctttaattgttcaacttcctctggtgttttacgtaagcgtgcttcagcaacaaatggggatacattatttgtaaatgaagaatcaggaaaggcgattcttaatgcttctaagcgatcaactgaaagatgggctttttcaatagcaatattatttggagtaccaatacgctgatttaccaagtcagcgatttttgaccatggattttcgtgatctaggtagccataaacatctccatcccaagccgaatttttagcttcttcaacatttaactcaggtgcaaaaataaaggctgacttatctttaaaagcaagtaaagcaaaaattctttcatgaggatccatgctatagcgagtaaagtaattaatactaattggatcagagatgtaggcaacatcattattggttgaaattaaccaattttgtaacttatctaagttcataattttaactccttttttaacatatactgggagtatatcatataatatggtaaaataattagtttttagtcgtaaacggttgcaatgtcttgatattcttgataagttataaaagagtgtttttacaggagtgtgagaaatttatgcaaaaacaagaagtaactatttatgatgttgctcgtgaagcaaaagtttctatggctactgtttcaagagtagtaaatggaaataataatgtacgtaaagaaacacgtgaaaaggtattagctgtcattgaccgtttgcattaccaacctaatgccgtagctcaaggattagcttcaaagagaaccacaacagttggtttgattgttcccgatttaacgaatatgcactttgcagaattatctaaaggaattgacgatattgctacgatgtataagtacaatatcttactttctagcgtcggtaatacgttgttaaatgaagatcaagtgatccaaaacttacttaataagcaagttgatggtgtaatttatatgtcaaacttaatgagtgaaagtgcacaagagatttttaaacgcactaatacaccagttgttttggcagggactgctgatgcaaatcacgattttcctagtgtaacaattgattataaggcagctgaaaaagaagctttaggcttattattaaagaatggtaagaaaaatcttgctttagttgttggtgatggaaaagcttatgttaataaggacaatcgctttgtagcttataaagattttatggaagaacataatttagataatgttcatatctatgaagatgctagaacttacgaagatggctatgaattatttgaacaaattaaagcagataaagtagatggaattattgctactcgtgctgtaactgcagcaggtattactaatgcagcagttgatgcgggcgtatccattccagatgacttagaaattatctccgcggcttcaactaatgtggctaaaattgttcgtccgcaattaaccactgttcaacaaccactttatgatatcggtgctgttgcaatgagaatgttaactaaattaatgagtgacgaagaactagatgaagctcatgttatcttgccatatactttaaagcaatctcgttctactaaataaagtatagttataccaaaaatcctcttaggttaaactcaacctaagaggattttttaatatataaatttctaattatggagcagtaggagcattatctgctgccgcatcacctgcagtagcttctgtgctagcagatccgctaataggagcactttcacttggactaatatttgaatttacttcattagcttcattagcgttactactttctgatctgttattttgagatgaagaagcctcacgagtagaagtggtacttctcgtagttgaggaagaattattgtttcctccttgtcctgtactcctagcttgttcatcattagctcctacattccgattagttgaggaagaagaattattattagattcacgataaacttcatggtttttaccataataattttttgcattttctgaagttgatccatcagctacagagaagagaccattaatattcttcttcttagaaatcgtcttaccagtgtagattaagactttaccatagtcattatttttaccttctaagtaatcatagaagaggttgtagtctttagttgagccaccaataccaaatctagcagttgcatttggtgctggtgaaagacttaatgcggtagtctttttgccactgagatcaatattatcgccatcatagcttaccgttccaggtaatgttcctgttcttgctaagactctatttttataaacggagcgtggacgcgtaggagcatcatttaatttaaagatcgatggatcttccttatataatgcattagcaatattgacccataaatttaaattagtctcactagaattagaatctaagttgtatgaatgaccatagaagttatcatagcccatccaactagaaattgtaattccaggagtagatccattaaaccaaatatcacgataatcattactggttccagttttaccaattagattcttgtagtcgaacttcaaggtaccggttaagctcgaagctgtccctttagttactacttggtgtagcatcttctgcataatgtaggaagtgcctgtagagaagactttctgtgaatcttgtttgtgtttatagattactcgaccggatggatcttgaatttcttcaatataatatggatccgcacgtttaccattgttatagaagttagaaaaagcactagcattatcggctactgaaaaaccgtaatcagtaccaccaagagctaatcctaagttttcaaattcgctcttacttaaatttaagcctaatttcttcatatcttgacgcagattgatatttttatcgttaactaacttactgtataaatttacagcaggaaggttataagacttacttaaagcttcctgagctgaaataaatctgttttcaacagttgagttatagtcagttggaatatagttaccaaatctggtagggaagtcagcaattgcagtttggcttgaaataagcttatgctctatagctgggccataaactaaatatggcttaattgaagaaccaggagagcggtaagtatcaaaggcatggttaatttgagaatttttaaagtcaaccccaccgctaaatgctaagaccttaccggtagcattatcaattacgacactaccgttttccacgtgttcggtggtattaacccacttgttagtagaagaatcaaaatcgcgagaagttcggtcttgaccatacttgttttgcttaacaacttgttgcatggtctggtatagtggctttctaattgtagttttgatgtgatagcctttttgatgaagaagctcagttgcgctagttaggtactgattatagcggtttatatcttgtttaacgtcagatacttttaaaccatcttgttcaatcaagttttcggctaaaagactggcactcttattcattactagattgtataaataaccgctttgtttcttttgcttcggtgctttttcaggagcaaggaagtcagcgcgcaaatcatattttttagctgcaagataagcttttttactaatgtcgccatttctgtacatacggaataaaacaatgtcttttctccgcattgctaagtcaagatcacttttaacttttccatttaagcgatatggagtatatacagacggactttgaggcagaccagcaataaaagcagcttgcggtaaattaagttcagaaattgatttaccaaatataccttcagcagcagttttaatgccgacaatattttctccgcgattatttttaccataaggggcagcatttaaatatgcacggagaatgtcttctttagaaaaatgtttttcgatcttatgagcataaaacatttcagtaacttttcttctccaggttgtttggctagttaagaattgcatcttaaccaactgctgagttaaagttgacccaccggtctgcacaccaacacctgttaattcagaaaggacagctctaactaaggacttaggtaaaacacccttatgaatataaaagttttcatcctcagtggctgttacagcattcttaacgaggggagttaattcactttcactcgcctttttagtaactgtatctggtcgaacagtagcaatttttttattaccagcatagtagagtgtagctgaattttgagcatgatttatttgatgatttaattcgctaatagttggaataggttgattacgaacaataccaagtgcataaccgccgccaaaaccaattagtaaaaataaaccgaaaaatgcaattaagataaaataatgaaaaacacggcgcaaagttaaatagacgataccactgtaaaatttccactggctttcatctgattcgctttgcagtgttttaacttctggccccgcagttaggaactttctgattttctcttttaaatttttcacagatcaggatcctttgttaattacttttcacctattatagcaaaaaaaggactagcattgatgcagtccttctttacgaatttattaatatttttggtttacttagttaattcataaattgcttcggcgtaaatagcaattgaattgattaaatcatcaaccttcatgtattcatttggttggtgcataacaagtggggcaccttctggttgagcaccaaaagctacaccatgtttgaatagccggccgtatgtaccaccaccaatgataacctcatgtcccttcttaccagtttgtttttcataaacagaaagaagtgtcttaacaattggatcatcgccaggaacatagtgtggagcttcagcagagccttcaactctagcatctaaaatatcaccaaacttttcgttgatatttttcaccatttcttctggttcaataccttgagggtagcgaacattgtttaagaggtatgcattttgaccttcaaagttaaacatacttggtgaactggttaaatcacccattaaatcgtcatggtggaaaatgcctaatttcttaccattgaagtctttatgttcaacagttgctaggaagtgtaagaagttctttgcttggccatcaaagttaagactatcaaggaagagggcaaggtaagtagcagcatttctaccagtttcaggagctgatgcatgagcgccatgaccagttaatgttaaggcaaggcgaccgctaagcatttcagccttaccttcaagtttgtgttctttaaggaaaagatcaaatttttctttaataccgtcaatatcgccttcaagttgggcatgagcagtttgagggatgacgttagtagcaataccggattggaatgtccaaagcttaacgtcaccttggcttgggtcaaatttgaagtcaagctttagagtaacaattccttgttcaccgttgataattggaaattcagcatcaggtgagaaggcaacatcaggagctggttgatgcttgaggtagtaatcaattcctacccaattagtttcttcattagttccaaggacaaaatcaatcttctttttaggcttaaatccatgttcctttaagataagcattccataataagcagctaaagaaggtcctttatcatcagcactaccacgaccatagatttttccatctttaatagtcatcttaaatggatcagtcttccagccttcgccagcaggaacaacatccatatgtccaataatacctacacgtttgtcaccagaacccatattgattcgacctgcatagttatcaaaattttcagtgtcgaaaccatcgcgtttagcaaaagataaaaacttcttcattgctttaactgggccaggaccaactgggtattctttactggtgttgtttaaatcttcagaagaatcaattgcgattaattcttttaaatcatttaaaatagcatcctttttttcctgagctaattttttataatctagttcttccataaatgtactcctttaatttttatctctgattaaatattacagcatttacatcagaataagtcgaccaaaagtttttaattgggactttttctactggtaaataaggaaatagtgcaacgttggtttgacgataagctggatcaagttttcgataattcttataggcaaaagtgttcttattgaatagaccataatataagatcttagaagactttacccagccatagtcagtaagaagccataaatcattgactccgccacttacgcctaatattttatagcgtttattaggcatgagttgggctcttttaccagactgcctatcaggtttattataagtgaaaattggattttgggtaggattaataatacttaaattccaatatggcaaaatccattcaggctgcaaatctaagctaactagatctgcaggaacaaattccttatcaccaatttgataaaaagtttgtcccgatgcaataacagctgaagaaacatggacaggttgtaagaaactaatttgctttgaagttttcacatttagatatgggtttacgctaactccagtcggagtacgaccaaagtaaataccatctttattaacagtatattttttagtaccactcttggccaatttgtatttatagcctcttgcaggaaagttcgttacaactccatctacatcattgttaattaaccagttccataatttaggtgattcattcatttcggcccaaacaaatactttttgatgtagagcatgaagctgactgataagtttaggattttgagtgactaaatcagatgaaatgttaattccatttacatagcttaatacatcaaaattaattctttgcagagagccaacaataaaaattctaggtacatcaggtaataattgactcatagtctttagactaggggcagaaaagctatggatcatgacccgatcttgcatatgatattttttgatactgctagcaagaagctcctccatatttttagggctattatgtttagtctttttcgtttcaagaaggaacttagtattaggtttatctttataataatcaaataattgatctagcgaaatgattgactcaccgttagcttgttttaaggtatttaaataggaaaaattattttgtgatacaataaccggtgatccaacaactcggcttaagtcacggtcatgagaaacgactaagacgttatcttttgaaacatggagatcaagttcaacataatctgcaccatctgcgaaagctgagttgtcactttgaattgtttcttctggatatttgctggggttgcctcggtgtccgataaccagaaatccagattcaaaaataaaaattaaactaaaaaaaagggctaaaaagtaaagccggcttgttttcatgtgtacacctctattctttttaacaatagcatggatgtatacttttttctataattaatatagtagttaaaatcattttaagaaagtagatgctgaaatatggcttatgagcaactagacttgattgaagaagttactcgcaatgacggatcgaaatattatgaaatttcaaatatcgatcaaaacggaattgctgaactagctgtagaccgtggattaattaaaaaagttcgaatcttgcagttgaatttagctcgaactaaatcactacaactatatgaagaatatattaataaaacctaccaattagagaccttaactaatgagaaggattggaaagacccacaatgggtagagtgggaaaaacctaaaggaaaagtattagatgcctataacacagtattaaaagccaatcatattggttagaagaggaaaagtatggaaaaattacgtattattcatactaatgacctacattcacattttgaacaatttcctaaaataaaaagatacttgcatcaagctcaaaatgataagagcgttgatcaaacatttacttttgatgctggtgattttatggatcgatcacattctttgtctgacgcaacagaaggacaggctaacattaaattaatgaatgaatttaattatgatgcaattaccattggaaataatgaaggtatttcaaattctcatgcagttttagaaaaattatttgatcacgctaattttcccgttgtattagctaacctacgtgaggaagatgagagtatgccaaagtggtgtactccctataaaatatttgaaaccaaaaagaagactagaattgcagttgttggtttaacagctgcatatccaatgacatatggtcccaatcattggcatgtgaagttgatttctgatactttagataaattactgccgaagataaagggtcaatatgatatgttaattattgttagtcatattggtttaagggtggatcgatatatagcccatcattatcctgaagtagacttgattgttggcggacatagtcatgactatttagcaaaaggtgaaaaagtaaacaatacttggattactcagacaggaaaatggggtcaacatattggtgacattagtgttgaattaaatgatgagcatcaagtattatcaattaaaccaaacactgtcactactgatgacttaccaagtttagattccgatcaaaagcaaattgtagattggcatcaaaaaggtgagcagatgcttaaagcacgaaaaattgcttatttaccaggtaaatttgatcatgataagatggcagcaattcaagtttcacttgatgcaattagtgaatttgctggaactgatgttgctgtcttgaatagtggtttatttttaaaaccatttcatcagggagttttaacggaagccgacttacaagctgctttgcctcatccaatgcatgtggtacaaactaagctgcttggaagtgatgtttggcgcatggtaatggagatggaaaaaaatcgtcattttctaagtaaatttgcacttaagggaatgagttttagaggtaagatttttggagatcttgtatataagggaatacaagttgatcatgcaagtagaacggtttacattaatggaaaagaaattgatcctgaaaaagaatatacacttgcattgcttgatcactatgttttgattccatttttccctacaatttcaattatgggtaaaaataaatttttattccccgattatctaagaaccgtaataggaaactatttaaaaaagaaatacccaataaataaagagaaagaaaaataatggagtataaagaagcagataaagaccagccgctataccatcctttagctcatgtcattattaatgaagatattgtaatgattaacgggcgagagtatgaaattatagctaacgtaaaagatgctctagacattgaaatgcttaaggagaagtatgacccttatttagatcaatatgattatttagtaggggatgtctcaagtgagcatttgagattaaagggcttttatgatgagaatgatcgcgttgcaattgataaaaaagctaatgcaattgtggattatttagaagaatactgtaatcctggtagtgcatattttattttgcgtttagctcaagaaaatcaaattaaaaaaattgcttttggtaggcaaaataagagaaagagcacaaacaataactgctaccgtgcaaagcgtccttactttaaagaaagacgcgttcataaaacaaagattggcagtcataagacagccgtaaaatttcaacgtggaaatcataaaaataaaagctttgtaattaagaagagaaagggataattgtggaacataaagactataaatgttacttaattgatttagatggaactatttaccgtggcagcgatacgattgaaagtggtgtgagatttatacatcgtctccaagaaaaaaatattccccacttatttttaactaataattcaactcgtacaccacaaatggtagttgataagcttagaggacatggcgttaatactgatatttaccatgtttatacgccagttttagctacagagtcttatttactttctcaaaatccagatgcaactaaaataccaatttatattattggtcaaattggcttagtacaaggcttattaaaaaatgaacgtttttactatgatgatcgaaatccaaaatatgtggttgtagggatggatacagatttaacctaccacaaaattcgtgtagcaactcgagcaattagaaatggtgcaacgtttattggaacaaatgcagataaaaatttaccttctggagatgagctactacctggaaatggcgccctttgcacgatgattgaagtagcaacgggggttaagccaacttacatcggaaagccttcaccgattattgtagcgagtgcattgaaaatgttgaatgcacaaggacaagatgcaattttagttggagataactacgataccgatattatggcggggattaactgcaatattgattcactcttaacgttgacaggcgtaacaaataaggagcagttaaaagaaaaagataagaagccgacatatattgtagagaatctagatgaatggaaactatgaaaagaaaaccgataattgcagttgtttacaatttaatgatggcccttgctaccgcgactttaggagcagttgttttgagctggcccttactagcaatttttgtaaaggctcaaaagactgatttaatagtaagaaagtcactgggaacaataatgaaaaactatactcaacttttggattatttgttgctcccctttaaaaataaattgcaaatgtctgatttccctacttctccgagtgcagcacgccatttttatgagtgtaaattattgtttgaattagcaataattgtctttattgttggattaattattcttatctttttaaaaatgagaaagagaatgaattatatctacatttcgaaaactacagccttaatctttatgattttacctgtaattattttgccttttgctttaatgaattttgatgaatttttcatttcttttcatcacttattatttaacaatagtgactggctttttgatcctactaccgatcctattattaatgtactaacagaggaattctttgcaggatgctttgcaactggtgggataatttatgaattatatttttcatgttttattttgacaaaaaaataaaggagctttaaccaagctccttttttaatactaattttttctttatccaaatgatcaatactggtaccactgagattaagatgattgccaggacaattaatgagaagtgctcttgaacaactggaatatttccaaagaagaatcctagagcagcaaataaagttacccagagaaaaccaccgagaaagttataacggatgaaagtaccataatgcatcttacttgcgccagatacaaatggaacaaaagtacgaataaacggaatgaatcgtccgattacaatagtaattccgccatgcctgtcgaagaaattttcggcagcttttcgtttatcttgattaatcaacttattaaaccaactgtgcttagcaccttcagcttgtgaccaacgaccgatttcataattaattgtatcgcctaaaacagcagctgcaagaaagactaaatagcaaatccaaaagtgaagattgtattttggtgttgctgccattgcacaggcagcaaatataagtgagtctcctggtaaaaatggaaagataactaaacctgtttcaataaaaacaattgcaaacagaattaagtatgtccagtttccaaacatattcacaattgtgactaggtggtcatcaatatgaagaataaaatcaataagtcccataaataactatatattcctttcaaaaattagatactcgtagaatgaaaagtcattgttttttctggaaataggtcttgcataatgctgctaattgcaatttgagcctcgccaaaacctagggcaatcattggtacccggcctgggtaagtaatagcatcaccaattgcgtaaacatgaggcaaatttgtttgcattgtttgagaaacagaaattaaattattttctaattcaatgccccacttacgtaattgacgattatcacttttgaaaccatatgcaactagaatttcatcaacgtctttagtaataaaatcgtgacttgcaccaactctgtgcaaaactaattctattctattattgtttaagtgaagttcttttggaaggtaaggagttaaaagttcaacattttttaaacttttaagttgactaacagaactttcaagtccgcgaaattcatttctccggtgtactacatatacatcagatgttttacttaattccagtgcccaatcgagcgcagagtcgccaccaccaagaatggcgacttttttattagaaaagatttcgggatgttgcatggaatagtgaatatgggcttggagctctggagtagtagataaaggtagagtttttggcttaaatgctcctaaacctgtagcaataagaagacttttcacttgataatcatcatcaatgataatatcttctcctgttgagaaagagattttttttactttatgtgagagggttaatttagtattctcggtttgttcaaataatcgagaaactaattctttccctttaatagaagaaaaagctggtatatctttaatatctttttgtggataaagcatattgatttggccaccaacttcatctaacgcgtcgaaggtaatagtttttaatccatgtaaattagcaaaagaagcagcaaatagaccaaccggcccagcgccgataatagctaaatcatatttttccattgtaataagcaatcctccataagaattaatctagaagtcatgtctttagcgttaattaaaaagacagttataattaatattagtaagggatgagatagtatgcaagttaaaattggtgatatagttcatggaaaaattagcggtatacaacaatacggaatttttgtaagattggacagtcagatagaaggattaattcatatttctgagattcatggtggctacgtaaaagatataggaagagaataccaagttggagaaactataaaggtacaagtcattgatatagatccatattctaatcaaattagcttatctcgacgagcggtacttccagaagtcgaagaagcgagaaaaaagagagttcatttttggacctcaaaaagagctaaaaaggggtttatgccattaaaagaagttttgaataagcaaattcaagaagctaaaattagatattcaaaaaaagattaaaataaagtgttaagcagtagtacttaacactttattttttatatccgaattttaagacttaaatctcaattaaaataagaatgaaaaatgataaatctgaacaattaaattattaattaaatgaatattcgcaatatatatttttattcaaaaccatgttgacgaaaagtaaaaaagtctgtaaagtaatacatgctgtttgaggcaagcgaaaagagcaaataaaaaagttcaaaaaaagcttgtcaaagcgagcaaaagatgataatattataaagctgtcatttgagagagatgagaaaattaaaaaagttcttgtcaaagcttaaaagacatgatataatataaaagttgtcacatgacaacggtagtaccttgaaaactgaacaaagtttcgctgaaagtgtgcgggatataaaaatcccaaacaaaagcgaagtcaattcgcaagcaataaatttgagataactcaaagaaagttttagagctaaacgataaaaagctcattttcaaaaggaaaatgagagtttgatcctggctcaggacgaacgctggcggcgtgcctaatacatgcaagtcgagcgagcttgcctagatgattttagtgcttgcactaaatgaaactagatacaagcgagcggcggacgggtgagtaacacgtgggtaacctgcccaagagactgggataacacctggaaacagatgctaataccggataacaacactagacgcatgtctagagtttgaaagatggttctgctatcactcttggatggacctgcggtgcattagctagttggtaaggtaacggcttaccaaggcaatgatgcatagccgagttgagagactgatcggccacattgggactgagacacggcccaaactcctacgggaggcagcagtagggaatcttccacaatggacgaaagtctgatggagcaacgccgcgtgagtgaagaagggtttcggctcgtaaagctctgttggtagtgaagaaagatagaggtagtaactggcctttatttgacggtaattacttagaaagtcacggctaactacgtgccagcagccgcggtaatacgtaggtggcaagcgttgtccggatttattgggcgtaaagcgagtgcaggcggttcaataagtctgatgtgaaagccttcggctcaaccggagaattgcatcagaaactgttgaacttgagtgcagaagaggagagtggaactccatgtgtagcggtggaatgcgtagatatatggaagaacaccagtggcgaaggcggctctctggtctgcaactgacgctgaggctcgaaagcatgggtagcgaacaggattagataccctggtagtccatgccgtaaacgatgagtgctaagtgttgggaggtttccgcctctcagtgctgcagctaacgcattaagcactccgcctggggagtacgaccgcaaggttgaaactcaaaggaattgacgggggcccgcacaagcggtggagcatgtggtttaattcgaagcaacgcgaagaaccttaccaggtcttgacatccagtgcaaacctaagagattaggtgttcccttcggggacgctgagacaggtggtgcatggctgtcgtcagctcgtgtcgtgagatgttgggttaagtcccgcaacgagcgcaacccttgtcattagttgccatcattaagttgggcactctaatgagactgccggtgacaaaccggaggaaggtggggatgacgtcaagtcatcatgccccttatgacctgggctacacacgtgctacaatggacggtacaacgagaagcgaacctgcgaaggcaagcggatctcttaaagccgttctcagttcggactgtaggctgcaactcgcctacacgaagctggaatcgctagtaatcgcggatcagcacgccgcggtgaatacgttcccgggccttgtacacaccgcccgtcacaccatgagagtctgtaacacccaaagccggtgggataacctttataggagtcagccgtctaaggtaggacagatgattagggtgaagtcgtaacaaggtagccgtaggagaacctgcggctggatcacctcctttctaaggaaggcgaaagatgatggagagtgcgagagcactaagagaagtcatcgagaaagccaagcggaagcacactgagaaactttgtttagttttgagggtaatacctcaagagctagtacattgaaaactgaatataatcaaaagcaaaaaaccgagacaatcgaaaaaacagattgaagagcgaccgagaagagagagaaactcaacttgaaataggtcaagtagaaaagggcgcatggtgaatgccttggcactagaagccgatgaaggacgtgacgaaccacgaaaggcttcggggagcagtaagtaagcaatgatccggagatatccgaatgggggaacccaataccgcgaggtattatcattaactgttaaggttaatgaaggaagacgcagtgaactgaaacatctaagtagctgcaggaagagaaagaaaaatcgatttcccaagtagcggcgagcgaacaggaaagagcccaaaccaactggcttgccagttggggttgtaggactgcgatatagtacttgaagtgatagcagaattatctggaaagataagccagagagggtgagagccccgtacgcgaaattgcggagagacttagcaggatcctgagtaggtcgggacacgaggaatcccgattgaaaccgcgaggaccatctcgcaaggctaaatactaactagtgaccgatagtgaaccagtaccgtgagggaaaggtgaaaagaaccccggaaggggagtgaaagagaacctgaaaccgtgtgcctacaagtagtcagagcacattaaagtgtaatggcgtgccttttgtagaatgaaccggcgagttacgttatggtgcaaggttaagtcagaaaagacggagccggagcgaaagcgagtctgaatagggcgaaagagtatcatgatgtagacccgaaaccaagtgacctacccatgaccaggttgaaggcgtggtaaaacacgctggaggaccgaacccacgtgagttaaaaatcgcggggatgagttgtgggtagcggtgaaattccaaacgaacttggagatagctggttctctccgaaatagctttagggctagcctcgtgtgaatgataatggaggtagagcgctgtttggactaggggcccgtcaggggttactgaatccagataaactccgaatgccagatatcaatgcacgggagtcagactgcgagtgataagatccgtagtcgaaagggaaacagcccagatcaccagttaaggtccccaaatctatgctaagtggaaaaggatgtggagttgcgtagacaactaggatgttggcttagaagcagccaccatttaaagagtgcgtaatagctcactagtcgagtgacgctgcgccgaaaatgtaccggggctaagcatagtaccgaaactgtggatgcatatattatatgcgtggtaggagagcgttctaagtgcggcgaagttagatcgagaggactaatggagcgcttagaagtgagaatgccggtatgagtagcgaaagataggtgagaatcctatccgccgaaagactaaggtttcctggggcaggctcgtccgcccagggtaagtcgggacctaaggtaaggccgagaggcgtagccgatggacaacaggtagaaattcctgtactgaaattgttcgatatgagcaaaggagggacgcaggaggctaatgacgcatgttgctggaaatacatgtgcaagcagtaagaaaaaagatgagtcaaatgcttgtctttagatttcaagctgtgatgcggagcgaaataaaagtagcgaaggtcatgatgtcacactgccaagaaaagcttctagccagaacaattttacccgtaccgcaaaccgacacaggtagtcgagtggagaacactcaggtgagcgagagaactctcgttaaggaactcggcaaaatgaccccgtaacttcgggagaaggggtgctgatagtaaaatatcagccgcagtgaataggcccaaacaactgtttatcaaaaacacaggtatctgcaaaatcgtaagatgacgtataggtgctgacacctgcccggtgctggaaggttaagaggagagcttagcgtaagcgaaggtttgaattgaagccccagtaaacggcggccgtaactataacggtcctaaggtagcgaaattccttgtcgggtaagttccgacctgcacgaaaggtgtaatgatttgggcactgtctcaacgagagactcggtgaaattataatacccgtgaagatgcgggttacccgcgacaggacggaaagaccccatggagctttactgtagcttgatattgagtatttgttaaacatgtacaggataggtaggagccagagaaagtaggacgctagtcttaccggaggcaatgttgggatactacccttgtttgatggatcctctaactcacagagctgagcgttctggaggacagtgtcaggtgggcagtttgactggggcggtcgcctcctaaagtgtaacggaggcgcccaaaggttccctcagaatggttggaaatcattcgcagagtgtaaaggtataagggagcttgactgcgagagctacaactcgagcagggacgaaagtcgggcttagtgatctggtggtactgcatggaaaggccatcactcaacggataaaagctaccctggggataacaggcttatctcccccaagagttcacatcgacggggaggtttggcacctcgatgtcggctcgtcgcatcctggggctgaagtcggtcccaagggttgggctgttcgcccattaaagcggcacgcgagctgggttcagaacgtcgtgagacagttcggtccctatccgtcgtgggcgtaggaaatttgagaggagctgtccttagtacgagaggaccgggatggacataccgctggtgtaccagttgtcttgccaaaggcatcgctgggtagctatgtatggaagggataagcgctgaaagcatctaagtgcgaagcccccctcaagatgagatttccgatgcgaaagcagtaagacaccttaaagacgatgaggtagataggctaggagtggaagcatagcgatatgtggagcggactagtactaatcagtcgagcacttgaccaaagctcaaaggtttaaaggctagagattatattcagttttgagtgtaaaagctcagaaagagtacggtggcgatggcaagaaggatacacctgttcccatgccgaacacagaagttaagcttcttaacgccgagagtagttggtgggaaactgcctgcgagggtaggcagtcgccgtgctcttttttaatattccggcttagctcagttggtagagcacctgactgttaatcaggttgtcgtcagttcgagtctgacagccggagtttatggcaataataaaataatggagtgttgtccgagtggctgaaggagcatgattggaaatcatgtatacgggctttacctgtatcgagagttcgaatctctcacactccgttggagaatatttttcgccataatatgtatttcatttattgagtaaattttttgaaaaaagtacttgctttttgaaaaagatctggtatagtaatatatgtgctcaattgtgagatctggcccgttggtcaagcggttaagacaccgccctttcacggcggtaacatgagttcaaatctcgtacgggtcattgccatattaaatatggttgttggaggattagctcagctgggagagcatctgccttacaagcaggaggtcacaggttcgagccctgtatcctccatcgttcacgggactaccaaatatggtagtccttttttgtgtttaaagacaaatgagcgaatttttattgtatatattgttattcggttaaggtcccgaaaggattcgtttttaacgaagatgccttgtaaccgaaagatgggggactctatgaaaaaagaaaaacgtttatttacttcggaatcagtttcagaaggacatccagataaagttgcagatcaaatttctgatgctattttagatgcaattttagctaaggatccagatggtcgtgtggcttgtgaaactactgttactactggtctcgttttagttgtaggtgaaatttcaacctctgcgtatgtggatattcaatctgtagttagaaaaactattttagagattggatacaatcgtcctgaacttggttttgacggtaataattgtgctatcttagtcgatattgatgaacaatctagtgatatcgctgatggtgttaatgaatcacttgaaacacgtgaaaaccagcaggacaaagatgatttagataaaataggtgctggtgaccaagggttaatgtttggttttgccattaaggaaactcctgaattaatgccgctacctatttctttagctcattcattgatgagacgggttgctagtcttcgcaaagagggacgtcttgattggctaagacctgatgcaaaagcacaagtaactgtagaatacgatgatgaaaataaaccaaaacgtatagatacagtggttatttctactcaaactgatgcaacagtaagtaacgatgaaattcgtgaagcaatgatcgatatggtaattaagaaggtcataccatctcaatatcttgataaggatactaagttcttgattaatccttctggtcgctttgttattggtggacctaaaggagattcggggctaactggacgtaagattattgttgatacatatggtggatacgctcgtcatggtgggggtgctttctcaggtaaagatttaactaaggttgatcgaagcgcaagttatgcggctcgatatgtagctaagaatattgtggcagctggcttagcttatcaatgtgaaattcaacttgcttatgcaattggagttgcccatccagtttcaatcatggttgatacgcatggaacaagtaaagtaagtgaagatctattggtagaggcggttagaaatgtctttgatttaagaccagctggtattatcgaaatgctgaacttaaagcgtcctatttatcgccaaactgccgcttatggtcattttggacgaacagacgtggatttaccttgggagcatacagataaggtagaagcgctaaaaacatatgtgagcgagcatgcagaataaaagtaatactaaaattgtaacaattgctatctttttaacgacctttatgacagcgattgaagggactattgtatcaacggcgatgcccacaattgtttctgatttaaatggattagaaatcatgaattgggttgtttccatctttctattaatgactgctgtctcaaccccaatttatggaaaactagctgatagccttggaagaaaacctgtatttctattcggaattgctgtttttgtgattggatcagcactttgtggaattgcacagaatatggtggaactaatcctctttcgagtaattcaggggcttggatcaggagcagtacagccagtagctgttaccatcattgctgatttatatacgcttgaaaaaagagcaaagatgctaggtttaaactctggtttttggggagtagcttcggttattgcaccattgttaggtggattcattgttcaacatttatcatggcactggattttttatattaatgttccattaggaattttagcctttttactggtaatcatctttttgaaagaaacaaagacaagtaaggattccactttagatttaaaaggaacaacttgtttagtcatctttttattggccttaatggtcttcttacaagaaatagaaaatggctttaatttaatcttattgggattactaattattattgttgcttcagccatccttttctttcggatggagaagaaagcaaaagatccaattatgccactagatatgctaactagcaaagaatttacaatgattaatttgattactttgcttatttcaggggtagtcattggctttgaattctatattccaacttggatgcaaggaataaaggggacaagcgcttctgttgctggatttgcggtgacaccaagttcgttaatgtggattgtaggatcatttttaattggtggaatgcttggacgatggggaataaagaaaacatatgattatatgttaattgtccttattggagccgatttagccttaatatttgttcccatctatacctcattttgggtattttgtctgattgcagcattcaatgggacagcctttggagctattacaactgcttcgcaagttcgttctcaagttttagtaggacgcgataaaattggagttgcaactagttttaatacattgatgaaatatttagggcagactatgatggtctctatatatggaattacatttaacatggttgtagcaaagcagttaacacatcatccgcaattaactcaaagaatgatgaatgatattgtttctgctgataaagctaaacatttagcacctaatttaatccccgctttaagagaagttttattaagcggcttaaagtcggtatatgtggtttctttaattgtgataattttatcgttagttcttaatcaactttataaacagaagaaaattgttgaataaaaaatgctaactgagtttaacattatactcagttagcattttttatttattcttttttaaatagaggtggtataaaacggaaaatccaagtaaaacaaatgttgtaccttctagccatccaccaattacgtctgagggatagtggacatgacagaagatcctagtgtaaccaataaaaagtgggaaaatactccaaataataattaaaatagtgcgccaggatttattttttactaaaaggatagttaagactattagaataccaaagaaagttgcactacctactgagtggcccgatggaaagctataaccatcagcaaaaactaaatggtgaactaaggggcgatgacgttcaacggcatgtttggtaatccaattataactattggcacagatcattaagccggctgagaagaaagcataggcgaatcttttggcaatcagcaagcaaataaataaaattatcgtagcaatggttaaagtactagtattaccaattactgttaatttagtggcaatcgctacattagtaggattgttgttagaaagtagatgaataatagtttggtcaaaagaatgtatgaaaggatttttataaatgaccaagagtgcccaaattacataaagaattaaaaaaataaatccaggaataagggtatcgtggatagttaaattgttatatttctttttcaaaaaaatttctccccttgtaatttctagtagatgtggtaaattataatcattatccatcaaaaaataaaggctagggagtagtaacaagtcagagttgttattagagatgagctggttggtgtaaagcttaacaatgatgctgtgaacttgccctaacgacaggtctatcgtttgccttccgcgttaaggggcacgagtgtcacacattgaatgtgtggaacttaggtggtaacgcgaaattaacttcgtcctatgattttaatcatagggcgtttttttagttttaaggagagatatttttgtataatcacaaaactgtagaaaaaaagtggcaaaaatactgggctgagcatgatacttttaagacaggcactgatcctaagaaaaagaattattatgctttagatatgttcccatttccatctggtaaaggtcttcatgtaggacacccagaaggatatactgcaactgatattgtttcaagaatgaagagagcccaaggctataatgttcttcatccaatgggctgggatgcatttggtcttccaactgaacaatatgccttaaagactggtgaagacccagaaaaagttactaaagaaaatattgctaattttaaaaagcaactgaataagcttggtttttcgtatgattgggaccgcgaagttactacttctgatccaaattactataagtggactcaatgggtttttgaacaaatgtataagaagggcttggcatatgaagctgaagttcctgttaactggtctccagatctaggcacagttgttgcaaatgaagagattattgatggtaaaactgaacgtggtggttatccagtttaccgtcgtaatatgcgtcaatggatgcttaagatgacagcttatgctgatcgcttgctcgaagatttagatgatttagattggccagagccagttaaagaaatgcaaagaaactggattggtcgctcagaaggagctcaagttacttttaaggttaaagatagtgataaaacatttgatgtgtttactacacgtcctgataccttatttggtgttagttacactgtcttagctcctgaaagtaagttagttcaagaaattacaactcctgaacaaaaagaagctgtggatgcttacattaagaaaattgaatcaaagtctgatctagaaagaactgatctaaataaagacaagaccggtgtctttactggtgcctatgcagttaatccagtaaatggaaaagaagttccaatttggatttctgattatgttttagcaagttatggtactggtgcagtaatggcggtaccagctcatgatgatcgtgactatgcttttgcaactaaatttggcttgccgatcaatcgagttattgaaggtggaaatttagaaaaagaagcctttggtggagatggtaaacacatcaattctgaattcttagatggtttaaacaatgaagaagctaagaagagaatgattgagtggcttgaagatcacaatgtaggtgaaaagaaggttaattataaacttcgtgactgggactttagtcgtcaacgttactggggtgaaccaattcctgtaattcactgggaagatggtactacttcactagttccagaagatgaattaccattacgtttgccacatgcaactgacattaagccatcaggtactccagaaagtccacttgccaatttgactgattgggtaaacgttgttgatgaaaacggtcgaaaaggtaagcgtgaaactaatactatgcctaactgggcaggttcaagttggtactacttacgctatattgatccacataacgataaagaattggctgactatgatttacttaagaagtggctccctgtagatctttacattggtggggcagaacacgctgttcgtcacttactctatgctagattttggcacaaggttctttatgacttgggtgttgtaccaactaaagagccattccaaaagctttataatcaaggtttgattttaaagaatcatgaaaagatgtctaagtctaaaggaaatgttgttaaccctgatgaagtaatcgatgaatatggtgcagattcacttagaatgtacgaaatgttcatgggtccattagatgcttcaattgattgggatgataatggtcctgcatctactaagaaattcttagatcgtgtatggcgcttatttgttaacgatcttgacctaaaggcaattcctcaagaaaagattgttgacgaaaatgatggtgaacttgataaggtatatgccgagactgtcaaaaaggttacagaagactttgaagctttacactttaatactgcaattagtcaaatgatggtctttatgaatgcagctcaaaaagctaagactattccacgtgaatatgcagaaggatttgtacaacttcttgctcctgttgcacctcacatgatggaagaaatctggtcagtatttggtcatgatgaatctattgcatatgcgaaatggccagaatatgatcctgcaaaattagttgaatcaacagttgaaattatggttcaagttaatggtaagcttcgcggcaaatttaaggctgctaaggatagtgataaagataccttagaaaaagaagctcttgctcttgatcatgttcaaaaattcttagaaggaaaagatgtcaagaaagtcatcgttattccaaacaaaattgttaatattgttgctaagtaatttaagtttttcctaaataattaatatttgtaaatacaatttacattaatgagtaatatataattcagacgcttaactggatatagggaaaatttatctttatggaaaacaatactaaaaatactaaagagacaatggtcaaaggctccgcatggatgacttttggctctattgtgtcacgaattttaggagcattgtatattattccatggtatgcctggatgggaagtcatgggaacattgccaatgctttaacagcgaaaagctataacatttatagtttatttattattatttctaccgccggtattcctggagcggttgccaagcaggtggcgaaatataatgctttaaatgaatatgatattgggcgaaaactatttagacgcggcttaattttgatggccatgtttggtgtgatttgtgcagcaattatgtattttggtgctccaattttagctactgatgatatcattggtgcacttttgcatggggctaaaagtgatccacgtcaagttgccgtgatgagaagtctttcttatgcagttttaattattccaattttgagtatcatgcgtgggtatttccaaggttatgcagatatgatgcctccagctatgtctcaatttattgaacaattggcccgagtgatatggatgctattgacagcttatattattatgcaagttcaacacggatcctatgttcatgcggttgttcaatcaaatttagctgcagctattggtgcggtgtttggaattttgctcttagtatggtttttatatcgtaggcgaaatgaactgaacgtattaatggagcaatcaaaccacgtaattaaaatttctactgcaggaattttctgggaaattattaatcaatctattccatttatcatcattgattctggaatcaccttgtttcaattaattgaccaatataccttccatccaatgattgctatgtttgttcatgctagttctgatcaaattgaatcatggtatgcattgtttggattaaatgcaaataaattaatcatgattattgtatctttagcaactgcaatgtcagtaactgctattccgcttttatcaggtgcccatgcacgacgtgattatgccagcatttctaaccaaattgaaaacaccttggaattattcttatttgttatgattccagcttcattggggatggctgctattgcaacgccaatttatacaattttttatagctacgatcaactaggttcaaatgtcttgtacttatcatcatttacggcaattagtttaggactatttacagttttgatggcaattttacaaggtctatcagagaacggactagctataaaatacctagttttaggaattatcattaaatttgctgttcaacttccaatgattgaattctttaaagtatatggaccgcttctagctacaaatgttggattaattattactatctggctgtctttaaaacacttaaaagttagatacaaatacaatagtagtcgtacatcgagacgatttattggaattgcaatcttttcaatggccatgtttgtgatagttaccggggtagttaatttcggtggaaaaattatttcgcctgaacgtaggccaacctcatttgttcttgttacacttgcggtagttattggcggcttactctatgcctttttaacagtgaaatttggtttagctcaaaagataattggaccaaaagttgatagggtcttagaaaaattacatattaaagtttaaaagagaaaaaggaaacttgagtaagatacttacctaagtttccttttttgcccctgccaaggaagtctattatataatattttcggagaaagtgaggaagaaaaaagtggataacatgcttgtatatgctgcaaaagagaagcgaagttttaatgaatttcccttaaatgaagtagatagtatgattttttctcaattagcgtattgtaattttgatactcttcctcagcatcatagtttacaaagtttggcttctgatgacgagattaagactttaactcaagggaatctcggtggaaagaatactgaaaagttaatcaagattatgctagaaaatccccgctttaaaaaactatgttggcgcaatgtggttagtaaagtagatgcaaaaacacaaatgcaatttaatgctgttacattttgtattgcagaagatcaatactatattgcatatcggggaacaacggctactaccatcggttggaaagaaaattttaatatgtcttttaatgattgggtaccagctcattactttgctcgttcttattatcgaaaaatcaaaaatttgttttcagggaaattttatcttggtgggcattcaaagggcggaaatttagcttttgccgttgcattgaacctaaaagaatccgacctgtcacatattgctagaatcgactgctttgatggaccaggttttcataatcaagaacgattaaagaatagattcttgaagttaaagggtaagattcataaatatattccgcaaggttcattgattgggatattacaagatgatctgattggagaaaaagattattgtactattgtggcagcttctggaaatagtttgctccagcatgatatgtttacttggcatgttatcgatgatcaatttgcaaccgtaaagcaattagatagcacatctgaagtttcatggaaggcaattgctgaatggctaaaaaatacaaacgatacggaaagaaaagattttattgaaatgctctatctaacggtgagtgacactaatcaaatttatttcagaaaactgttaacgcctaagacgacatataaattagctactcgtttgataaaaaacagttctacccaaaagaatgtttgggaaccaataataagaaaactttttaaagcctatgtgaattcaggagcagcagcttttagtgaacaaagaaaaaatcaattatcaaactttaaaagaattttagatgaacaacgcaataaataggttaagttataaaaatctatcttgaattaaaaactacctgcttatctagaaaaagagtaaaataacgattgaaagaggtggacaaaattgaaaaaagatacatatatgactttactaggattccgtgatacttgttataatgatttcaattttgatattgatgagaaagatttttatttaggaactgatacctataaaaaaattgacaagatattaaaggatgcacagaatgaacaattattagttcagtttgaagagggtacttatctttatcaagattatgatccagaatacttgagcgtagcacaaaagagagaaattcaacatgatattaatgcagctcgtaactttttggataattacgacggggatgtagacgataagcatgataactatgcagcttacctagatgataattctttgagttattcttttggtccagatagtaatttagatgaagtacaaaataatttaaatgatattgaaaccaatggcgtaatcatttggcaaagacgaaaagatgaatatattttattaccacataccattcatagccttgaaagaattaaaaaacagattgcatcaagtaaacgtgtcgatgataaaaaattgcgttatgcaatggagcgcttatttgacaatataactgattttcttaagccatttagtgatagtgaattaggaaaatacgaaaatacaatttcacaggagcttagagataatttggaacattatgctttaagtgttcaaactgatgcacgtgaagtagctgcagataaattaactaaatatgcagtgcaacttgcagaaaaagaaaataatgacagtatttaaagtaaagctcatcgattagatgagcttttttggataggacaaaatgaaatctatttcaaaagaattaatatctacagtaataaagaaaagaaaaagtgctacccataaaggtaattatggccgcttactcctaattggaggtagtaaaaaatatggtggagcactgattatggcagcagaaggcgcactaaacagtggtgcaggcttagtgacagttgctacagaccgagtcaatattgccgctttacatactagagacccagagattatgactcttaattgggatgaaagcatagaattaaaaaatttaattaaaaactctgatgtagtagtttgtggaatgggtcttggattagatgataaagcacaacaaattttaaggctagttagagataatatcaccttaaagcaaacactaatcttagatgctagtgcactagatttaattggtcagcaaacggatttactaccattaaattcaaaaattttgatttttactcctcatcaaatggaatgggagcgattaagtggaataaaaatttctgatcaaagtgatgaactaaatcaagtagctttagataaattagttaaaaataagaatgcgattttggttttgaaatccaatcacactaaagtttatgatcaagcagggcatatttatttaaatccttttggtaatccaggaatggctattggtggtatgggagatacattagctggaattattggtggattttgtggtcaatttatacctaacttagaaacagtggcagctgctgtggggattcattctttaactgctgataaaattgcagagaggcaatatattgttcgaccaactcaattatcggctcatcttccagagataatgaagcaatatgagaaataattaagtaatgacgaaataagttaaattgcataaagagaaattgggtgaccgaatgagacatgcaaagaagaaatctaggaaaaagtatttatggttaattagccttgtaatagcagctatttgtttttttgtatggaaaaacaattttaactcaaatagaatgccagctaattatcatgctgaccaagtagatttaaacgttaaagctgccgtagcaattaatgcaaaagatggatcaaccatttacgctaaaaatgctaatcaaagcttgccgattgcctcaatgaccaagcttttaaccgtttacttaactctccaagcaattaaagagaaaaagatatcttgggacacaacggttactccgactcaagaaatagttgacttgggctcaaatccagattacgcaagtgttccacttaggctaggacaaaaatataccgtcagagaactatacgatgcggctttaataaagtcggcaaataatgcagctcgtttactcgcgattgcagttagtggaagcgagacaaattttctaaatcaaatgcgccagcaagctcgtaaatggaaactcaataatgctaaattcgtaactgttgatggtttaccagagaaaaagaaaaattttttagggatgacgacaacagttgaaaataaaatgagtgccaatgatatggcgattgtagcaagaaaattaataactaattatcctgaaattctaaatactacgaaactagctagagcatattttcaaaatactcttatgactaatagtaataaaatgttaaacggtctctcatactatgattcgacatttcctgttgatggtttaaagacaggtactactgatggcgctggttcatgttttacttgtacagtgaataaaaatggaaaaagagtgattacagtaattttaggtgctgaaaatgataatgaacggtttgtggagacaaaaaagttattaagttactgttttaattaaaattttactatgcattagatttaatattgcactttccctaagtttgctgatataatcttcatgacaaaaggttaaaagtagtagtattgcatatgttttcagcgagtctatgtttggtggaagttagacaatggggcaatatgaaggcgtgtttaactttaactttaaaatcaattaataagcggatactttgtatcaagtagagtggtaccgcgggaactttctcgtctctttctagtttactaggaagagactttttttatgcaagaggtgttataagtggattttaaacaaaaagtcgttgatttagttagtgaacaggtagatttacctaaagaaaaaatttctatgttaattgaaagaccaaagaatcctaagatgggtgattatgcttttccagcatttgctttggctaaaattgaacataaaaatcctgctttaattgctaaggatattgcagaaaaaattagtgatgataatttcaccagtattcaagcagttggaccatatgtaaacttcgcaattgatcatgcaaaattagtcaatgcaactttaaacgatgttctaactgaaaaagaacattttggtgatcagaagcttggtgaaggaaatgttccaattgacatgtcctctcctaatattgctaagccaatgtcaatgggacacttacgttccacagtaattggtaattcaattgctaagactttagaaaaagttggatatactccaattaaaattaattatcttggggactatggtacccaatttggtaaattaattactgcttatcgtttatggggtaatgagggagatgttaagaaagatccgatcacaaatcttttccattactatgttaagttccatgaagaagctgaaaaagatcctaaattagaagatgaaggacgtgctgcctttaagaaactagaaaacggtgatgaagaagaaatcaaattgtggaaatggttccgtgaagtttccttacaagaatttaaccgtatctataaagaattaggagtaacttttgattcatataacggagaagcatttttcaatgataagatgcagccagtggttgatgaattaagagaaaagggcttacttgaagaatctcgtggagctcaagttgttaacttgggagaagatgaaaacccagctttaattttaaaatctgatggctctagtctttatatgactcgtgatttggctgctgccttatatcgtaaaaaagaatatgattttgttatgtcattatatgttgctggtggtgaacaaactggtcactttaagcaattaaaacaagttttgaagaagatggggtatgactggtcagataacattcaccacattccatttggtttgattactcaaggtggaaagaaattatctactcgaaaaggaaacgttgttttcttagatcaagtcctaaaagatgcagtttctttagcggaacaacaaattgaagaaaagaatccaaatctatctaataagaagcaggttgctcatgatgttggtgtaggggccgttgtattccatgacctaaagaatgatagaatggataactttgattttgatttggaagaagttgttcgttttgaaggggatactggtccatacgttcaatacactaatgctagagctcaaagtattttacgcaaagctaataaagagatctcaatggataatttaagcttaaatgatgattggtcctttgcagtcgcaaaagcattagctgatttccctgctattgtagaaaaagcttcagaaaaatttgaaccatcaattattgcaaaatatgccttagatttaagtaagaaatttaataagtattatgcaaatgttagaattttagatgaagataatcaactaaacgctcgtcttgcattagttcaagcaacttcaattgttttaactgaagctttaagacttttgggtgtaaatgcacctaaagaaatgtaatatttctttaaataaaaatattcactgaatttttttgagctaaagtatgttaatttttgcactaatgggttaaactagtgatgtgttaaaaatttaggaggtatttttttaatggcttatttagtaaatggtaatgacattttcaaagctgctcgtgaaaaccactacgctgtaggtgcatacaacactaacaaccttgaatggactcgcgcacttttaagaggtgctaaggaaactagaactcctttattgattcaagtttctactggtgctgctaagtacatgggtggttacaagactgttaaggacttagttcttaacgaaatggacaacatggatatcgatgttccagttattttgaacttggaccacggtgactttgaatcagctaaggaatgtattgcacttggttactcatcagttatgtttgatggtcacaacttaccaactgacgaaaacttagcaaagactaaggaaatcgttaagttagctcacgaaagaggtatctctgttgaagctgaaatcggtaagattggtgaaaaccaaggtgccgatggtggtgaattagcatcagttgaagacgctaagactttcgttgctgctggtgttgacaagcttgcttgtggtattggtaacattcacggtgtttacccagaaggttggactggcttaaacttcgatcgtttgaaggaaattgcagaagcagttccaaacgaaccacttgttcttcacggtggttcaggaattcctcaagaccaaatcgaaaaggcaattcaattaggtattgctaagattaacatcaacactgaattccaattagcattccaagctgcaactcgtaagtacatcgaagacaagatggacttagacaagggcaacaagggttacgatccacgtaagcttttgagagctggtactgacgcaattactgattctatgaaggaaatgatttcatggatgggtactgcaccaatcgacacaaaggaatcatcagttcaatttgatgaagcttcattaaacgaagaataatcaaaaactatattaaaaaagacctcagaaattgaggtctttttttattagcttaagtgtggaaaaatgcaagtaatatttgatgatcgtggatgtaaaagcttttttaaaaaatataataggcaaaaaaagataatcaaggatctaattgaaaaagccattgttaaagaagttaccactgggatgacaaagattaaattggctagtagaaaaagaattaagggacaaaaaatttatgaatttcgattaaatcttggtactattggatcggctcgaattgccttttcagtttttaaagatcaggctactatttatttcattagtaaggatatagaaaaagcatcttttagtaaggcatttgaaaaaattttaagataatacagggtagccatgatatacaagtatagtaaataatatcgttttcaaaaaatagttatcaaagaaatcaaaagtaaagcaaaaaccctcgttgacttagatcaacgagggttttttaatactaaattgtagaggaaaatgaagaatgaattatggatttatttcctacgaacctttacaggaactggaactggtttatttataattactgcgttagtagcaagtactgcgacagcactaatacctaaaattaataatagtgtcatttaaaccattcctttcttacttgattgatatcaatattaagagtaatttgtgaattttttgtgacttatatttaagataaaatctaaaaaaatataaataatttttctttatttataaaatacgaacaatataattattagtagtaaaaataattaataaataagtgtaaaaagactaaaaaaatcatcggatttatgttagaatttcatcattgacgattttaataaagaggaattaaagaatgaataacgatatcgaaagtgtattgtatactcaaaatgatttaaacaatcgtatggatgaaatggctgctgaattaaataaaaaatataaaaatgaagagccaattatcgttccagtcttaaatggagcaatgatttttgctagtgatatgattaagcgattaagttttaagctaacgattgatcctatcaaggcatctagttatgaaggaagccactcaacaggaaaagtaaagattacgcaagatattaagtcagatgtaaagaatcgtccagtaatttttatggaagatattattgatacgggacgtactttacaagcgcttagtgaaataatgaaagaacgtggggctaaaagcgtagaagttgtatctatgcttgataagcctgaaacccgtgtcgtagattttcatgtagattattatggttttaaggctcctgatgagtttttagttggttatggattagattacaatggcttgtatagaaatttaccttatgtaggaattttaaagcatgaagtttatgctagttaaagggataaataatgcgcgttaatgtattgcaacatactccaaacgaggggccaggagcaattaaaacctgggcagatagtcatcatcatgaattatatgtgtatcaccctgaaatttttggtaaattgccaactgctaatgaaacagatctactcgtaattctaggtggccccatgagtccaaatgataatctagaatggattaagcaagagagagttctaattaaaagaatgcttgatgccggtaagccgatgtttggtgcttgtcttggcgcacaacaaatcgcaatgactaccggagctaaaattttagatgctcctcataaagaagtaggctgggctccagtttatttaaaagatacaacactaccggatattcctaaagaactaacggcccttcattggcaccaacaaatgtttgaaattcctgtaggtgcaaaacttttattttcgagtgacttcgtagagaatcagggctttttattaggagataatgttatcggcttacagtttcattttgagcctgaagaagataacgttcgagaaattgccattaacgatagtgagtatccacttgaaaataatgatttaaatcagactgctgaagaaatcattgctcatggtgtaccgagagaaaataaagaggtaatgtttaaattactcgattttattactaaaaaatgagtgtaaattttggactactaataaaaagtaagctatcataaagctgtaagttttttcgaggaggaaaaattatggctaaaatatttatttttggtggttccggaagagtagctacagatttaattaaagatttagtagctgatggtaatacagtgacagcagcagctcgtcatccagaaaatattattaaacttgatggtgtaacacctgataagcttgatttacatgctgatgtagaagatattgctaaacaagtaaaaggttttgatgctatttactttacggctggatctcgtggtaaggaccttatccaaactgatgctatgggagcaattaaaactatgatggctgctgaaaaagcaggtgttaaacgctatattatgctcagttcaatgcttagtttagatgtagactcttggaagaagattccaggtcttgaggactatctagctgctaaattctttgctgatacttatttaatggattcaactaatcttgaatatacaattttgcagcctacgaatctcactgaagaagccggaacaggcaaaatcaaacttgatgctggtccaagtgactcaaatccaattcctgatgttgctaaaacattggctgagattctaaaatatccaaatactattgataaggttattccaatgagtagtggaaacataccaattgatcaagcattgaaagaaatctaactagaagaaaaagctccattgtggagcttttttgtgtttatagtggtcaactaccctagaatgaattctggggcttggtggttcgttagcttgcgctaactatttcaccaatttgcttagatacaggcttaacttgtttgaattgcgaaaatccaaacagcggttttcccaattaccaaagccttttgagtctgcaagttgccaaacggactgcagtctatttagatcgcttttttattttaggatttttccaaatacctttgcttttttctaagatgtttacagaagcattccaatctcttatgtgataacttccgcatactgggcaagtccattttcgatccttaagcgtaagtttcttatagccgttttgtcccattatgtttccgcaattatgacacctttgcgtagtaaattttgggtcaatcgtgacaaactttttgccatgaagatcagctttatattcgagcatggttaagaaactccgccatcctgcatcagaaatagattgggcaagagcatgattctttaacagatttttacttcttagttcttcggctactactaaatcgtggtttttgattaatgcagtagaaagaacctgcaagaagtcttgtctctgtctgcgaatcctgtcgtgcagtttagctacggctaggcgctgtttttgatagttcttggattcacacaaagagcgtccttcttttttggctctgcgttctctacgtgaaagtattctttgagcgtgggcgagctttttcttggctctgcgataaaaccttggattagctaccattgcaccgttagaatccgtcaagaaattatccaagttaagatcaatgccgatctgcttttgtgttttagcatagtctttgacaaaggcaatatcacttcccagctgtaaagaaagataaaactgatcgtctgccgttttcttaattgaggcagtaccgattcgaataggaatacggttaaacaaacgctttttaatcagcttgcgcaatccagcaattctcactattcccagtttaggaagcttaacatgcttagcgtcaataaatctaaccgtaccattatcaagataggctgcgtcttgctttatgtactgacagttagtctgatatgaccagctgcttcgtttcttgtgaaaggttggtattccatagccaattttatgatagtttctccatgctttgtgataattttgaattgcattggcgatagccaagctatcaatgtcttcaacacgcaagaaatcatatttatctctaatatttttaggtttggaaattaagtcttgcgtatcaatcattcttaatgcctgttgattttcatattcagacattccctgcattacaaagggcaaaccgctgctaagctgtttgatcctattggcctttttaacgtgatagatcaaacggccagcgccaacgtattggttataaacaaaacgctgtgcgtcataattctgcttaatcattttcttttgattattgctaggatagaatcttacttttacgccaaagtgatattctaaactgctcattcttttcattttttcacccccttttattgatatgatttgattatagactatgtagatattataatcaatagtaaacacttataaacaaagaggttagcaatattctctatgataaaaaagaaagacaaaataaaagacgcaggctatgaaaagcactacgtctacaatactcattatcatttgatttggtgtaccaaataccgcaatcaaatttttacaaataccaatttagccgaagaaatgcgaaagcttttattgcagattgccgaggataatcaaattaagatagaaaaaatggagatcatgcccgaacatgttcacttattggttagctttaagccctctaaatctggttctagtgtaatcaaggctctaaaaggtagaagtggcaggttgtttttgcaggcacatcccgaaattaggcaaaacaagatgtggggcggacatctatggtcgccaagctattattttggcagtgtaggcaatatgtccaaagaagtggtagagaaatacatcaacgatcaagtctataacgcaatcaaagacggtaagccctatccatccccgcattaaaatacggggatttacgggcggatttcattaaaaaagtgatttttagaatttaaacaccttagaaattttttctaaatatttttgatctaactcatcgaagttagctaatttagttgaatcaaaatcaaaaactccccataaatcgccgtttgctttaaagatagggacaacaatttcagaatttgattcactatcgcaggcaatatgtccagcaaactcatgtacattttttacaatttgagtttgcttttcttttgcggctgttccgcatacccctttaccaatttgaatatgaacacaagctggttttccttggaaaggaccaagaattaattcttgattctcataacgatatacaccagcaaagttaacattattaagtgaattgaacaataaagctgaaatatttgctgtatttgcaatccaatcgttttcgccttcgactaaggcttgggcttgttttaataataattgataattgtcttctgtagtggcagccataattgaataccttctttctgttaaattgttctaattataacattaatttagtaaattaaggattttaagccaatttttttcagaagaaacttatgtatcaccataactatataggcagtaataaaaataagtggagctaaagaaattggtaataaaaaaattaacaagatagcggtaaggagtggcttttctaaaataatagtgatgctagcaactactgctaacgagacagtaattgcgggctgaatagggatgaattgagcaattgcagcaccaacagcgacactagcaaaaattgctggaaaaattttacccccacgccatcccattgcaaatccaacatgggtagaaattgtttttattagagcaattaatagtaaaaataatggcgaataggaaagagcagttttagaaaatggaacaatgtgaaattcgcctgaaaagagtgcgtaatcagttactaaagttaaaacgcttagcacaatgccccataaggttgcttttaaaagtgctggtaaggcccaagtctctactctagtaaatattttttctaaatataagaagaaatatgcaaaaagcatcccacctataagaggaattagactataccagagaatagtccatgaccagtgaattggacgttcatgaattccgaatgctccttcttcaggaaaaagtttaaagatcaaaattgttccaattaatccaattaaaatattaaaagtgatgaaccattttttttgatttttagttctaaaaagctcactaaactttggggattgcaatagagtatctttatcaatgcctatttgccaaacatgaacccagcttttgtaatgagtagtcatcaatctaattttatctccgagccaatttatcatcccggaagtaagaacagtggtggaagcttctggcccaatacttccgccagctcctaatgataaaagccctaaagtaaaagatttccaccaagaatgataatcaagttttccactttttcgcacatcatgtagtacttcttcaatcgttaaaggataggaacctaatttctttactaagaaaccaataattattccaaatgatatacaaataagaaagggataagcgggacgcaaagaaaaattactatgatgattaaagtaaccccaaataaagtcaataacataattgattaggttgagatataaagcagttaaaataccaataataaaactccatatgccactaaaaattagaatatttatgctttttttagccattattttctatcaattcctttatgcaatttagattcatgatagcagtgtactttatttgttgtcttggttcaaatcgctcataataaatttgggagcagaataaataaagaaaggattggtccatttatgattggaagagaaactcaaatatgcctagtaaataaattagagaatattcaccatgttgtagttcaagcttccgcaattgatggaagtaacgtctttgccttgcagcttcttcataaacaaagcgacgttgttgtttatcaaactccaaatgatagcgaaactgttacatttgatgaagaccatcctattttatacttaaaaggtccaaattcagctggaactgctggtggacatacccagacctggatacaaagtggagaaaataataaatggtttgttggtactaaacccaaaagacagggaaatacatattggaccacacaaattgcaagagtaacagtaccggggtatcaaacacaggtatttgctaataatactgatttaccacgtctttcctatcttaaccgagcaggagctggttatggggatggaggtacagtttatccaggaaaagatttagtaagagtagaggccactgtttcaccaaatggtcattatttcttgattgcaagtattgatataaatcatacgggctattttgcgctttatgaccttaacgaagtaaataacaaattagatgaggcagaagaaaaagctgaagatattaatattgaaaacttaacatgcttaggagcatttaaggttcctcattttaatgatcaaaagattgtctctattcagggatacggaatagatgataataaggatatctatatttcaagtcaaccaagtcctcatacaacttttttgggttttccaagacagggaaggcctcgtgaaattgttaaaattccgtggggaatggttgatcccgataaatggtctgtagttaatttagataacagcttaaaacttgatgcgttagatttttgtactgaatttgaggggattcaagtaactagtgactgtctttacttaacagtagcttatcaccagcgcaacagtgacttaacaactctaatgaatcgtatctaccaagttgaaaaattttagaatgaaaaatagacagacttttatgtctgtctattttgctataattgataaaaatgaggtgtgagaaatggaaaaaatgcgttgtagttggggaaatagtaagaatccgcgctataaaaaataccatgatgaagagtggggaaagttgaatctagatgccacttacttatatgaaatgcttgtattagaaagttttcaatcgggattatcctgggaaacaattttaaataaacgtgaaaattttcgaaaagcatttgcaaattttgactatcataaagtagcaaaatttaatgaagctgattttgaaaaattgatgcaagacaaaggaattatccgtaatcgactaaagattaatgctgcaattaataatgcaaaagttttagttaaactagaaaacaacaatcaaactttcaaacaaattttaactaagtttattcctgaaacaataaatcaccatcctaaaaaaatggaagatgttcctgcttcaaatgaattatctaaccaaatttcaaaagaaatgaaaaatctcggatttaaatttgttggttcaataacgatatattcatttttacaggcagttggattaataaatgatcatatagaaaattgtagttttaagaatggagaactgtaatgcctttactactaccgacaaaacaagtggtgattatgtttattttaatgtttattggctggatttgctatcaggtaaaatttctccatgaacaaacagtaaaagatttaactaagatacttctttatgtggtatcgccatgcttaattattaattcttttcgccaatctttttcagttactagattaatacaatttagcttaatttttttgctggtacttgttttatttgtgtttaaaattattgtaagctcagttctctttaacaaaagaataattaaagacgagcaaaaaagaacaattctccgatatgctggaacttacactaacgcaggttttatgggaattcctttagtacaagcgcttttaggaaataatggtgtgtttttcgcagtaccatatttgattatttataacgtctttatgtggacgcatgggattaggatgtttactagaaaaaagcaatcatttaaagaaagttttcatcaagctatagttaaccctaatatcattgcagctattgtagggatgatattatttgtaattcaaattaaattacctgatatagtttctgaccctatgaattatattgctaatttgaatactccgctaagtatgattgttattggtacaaatcttggagctattaatttaaaagaagactggcatgataaattagtttggagtggggtattagttagaaacctctttttcccattaataattttaggcttcttactaattttgccacttccatcaattgctaaaatgacaactttaattatggcagcttgtccggtagcaggagtagtagtgctttttagcttaatcagtaattttgaagtaaaatttcctactaaattaatgtgtttatctactttagtagccattattaccattccagtcataattagtctggctaatttaatgggaatatagggggaaaatggaaaaatgaaagaaaagaagaagaactatttagcaatcaataaaactggtgtatcaattaagtggctcacaatagcctcactagtctatctgttaatctatactgaagctggtgatatagtaacggcattttctgaactttgggccccaatattgtatttagtgattgtttgctttttagcactgggagcaaaaatattttataaaacagatcgtgtttttattaagttacctaaagagggtaaagtcaatatcttaaccattatcttttgtattatgttaatggctttatactttttaatgaatttgattgcaagctgggcacaagtctttaatttaatgcctgaaatgatgtggtcttctatttgtgttgctttagccgctggaattggagaggaatttctttgtcgtgtaactttgtttaatttatttaccaagatttttgaaaataaacagtacgttttgctttggtcgagcattttttcttcagttttatttggattattccatttgattaacttaggacatggggcacagctagatgcaactttccaacaagtttattatgcaactgctatcgggttagccttctcctatctgcatatttttactaatcgaatctggccatgtattctaatgcattttttattagatttacaaccaaatattgcaaatatgaatgctgaagcttcaccatggggtccgatattaattatttttggaattgtaataattgtttcgataatttgtatttatgtttttaataaaaggattaataaagttgaaaattaaaaaagcagatcaattgatctgcttttttattggaataattaaagtccaaatggaatcttgtaaaggaaaattccgatgattgcacctaaaataggagcaactacaggaacccatccatagctccagtgagcatcctttttattaggaattggtaagattgagtaaacaagtcttggaccgaagtcacgtgctgggttaagggctgggccagttggaccaccaagtgccataaccaaagcagtgattaagaatcctacaccgatattggcaatgtcaactgcttgtttgaagaacatacccttgtataaaccgattgcaacaaacattaagacaccagtaccgacaagctcagaaatgaaaccattccatttactgttaacacagtcactagtagcaaaacatgcaaaaacaatgttagagtcggtagattttttgatgtatggccagtaaatagtgataataagaagttgaccacaaattgcgccaagaacttgtgaaataatgtaaggtgttacttgtgcccaagggaagacaccagcagtagcttgagcaagtgtaacggctggattaaggtgattaccagaaattgatccaaaaagcattgctggaagcataacaccaaaaccaaaactgaaggcaattaaaatccaacccccattggctttgccatcatgagcattaccagtagttccttttaaaaatgagttggcaacggcaccgttaccaaacataaccatgattagcgtgccgaaaaattcggcaaaatacttgagcatccaactatgttccataagatacttttttcctctcttgaaaaaataagtgaaaaataaacacaagtactgattatacctaagtttacaaaaaaagcatagatattttttaaagaatcttgcaattttaagcaaaaagtttgcataataagaagataagtgtccaagctctaattacaaaatgtaataagggctctttttgttgttgagggaagtgctttaatgaataaaaaacagattacgatggtgactgtagcgttgatgttagggaacgttatggcaggtttagatggaactattactaatacggctattcctgccatcgtttcagcgctacatgggatccaatttatgggatggattgtggcaatctatctcttaggaatgtctgtttcaataccaatttggacaaaaattggagaaaaaattactaataaattagcttttgaaatcgcactagtgctatttgttttaggctcaacgtttgaaggactagcacctaatatctactttttcttaatcgctcgaatgattatgggaattggtggtggaggaatgggatccttgccttatattattgcaggatacgtctttccaaacattaagaaaagaactcaagttttaggatatttgacagctagtttcaatggagcagcaattttaggacctttagtgggaggttggctaattgatgccttatcatggcactgggtattttatattaatattccaattggtttagttgctttgttaatttccttgctctattacaagccagttacaccaaaaactgtcccagtttttgatttacaaggggcatttttgctagtgaatggtttaattatgtttttaatgggaatccaactcttgggattaactgcaacttggattgtagtagggttgatcctatttagcttagttttactgatctttttctttttgcatgaagctaaagcagaaaatccaattattcctttatctatttttagtaatcatgatctaaatggtgatttgattttatttgcgactacgtggggagcttttattgctgtaaatacatatttaccaatgtgggctcaagctcttttaggaatgtcggctttaatgggtgggatgacgttaattcctaactccatcgttgaaattattgcatcccaaacagttgctacaattcaagaaaaaattagaacttttacgctagtaatgattggaattgttacaatgatgatttcatctggtggtcttttcttagctaatgatcaaactcctctctggatattaattttgattggggcattttccggcattggagtaggatttatttttgttgcacttcaagtaaaagtacaaatcgatgctggaatggaagatatggcaactgcgacctcaacttcttatttaattagaattttagctcaaactgttatggcagccgtatacggggtcatcatgaatttagcgttagcgagtggcattaatacccattcaaatatcacgatgcatatgatgaatgaactaagtgacgcaaaatcagctaaattattgccacaatccttattgccagaaatgcggaaaatttttcacagtggtattcatgaaattatggcagtctcttttattttgttgataattgctactgtctttaatttttatttcaattttaggcagccaaataaaaaacttaatagatcatcaaaataaagcttgtgtttaaggaattaagcaagtatattttagataagattattatccttgattattgcaaaataattggggctttttatttcatagaaaagtaggtgtactgatgacaaaaaagcaagtaacgatggtcacatttgctatggttttggcaaatgtaatggcgggattagatagtacgattattaatacagcgattccagctattattgcagacttacatggaattcaattaatgggatggataattgctattatgctcttaggaatgtctgtttcaaccccaatttggactaaagttggggaaaagattggtaataagtcggcttttgaattatcgttactcttttttgtattagggtcactttttcagggactggcaaataatatgtattttttccttttagctcgagctttaatgggagtaggagctggaggaatgggctcgctaccctatataatggctggttttatctttgataatattaaagcgagaacaaaaattttaggttatttaggggctgcctttagtgtggcagctattatcggaccactagttggtggttatttggttgattcactttcttggcattgggtcttttatatcaatattccgattggacttttagcaatttttctttcattactctactatcgtgaaggtacaattaaagagactccaaaatttgatgtattgggctctttcctaattattgttggtttaactttacttttattaggaatccaactacttgggttaactagtagctggattgtgatcagtttagttattgctggtatagttttactggtcttattttttatgcatgaggaaaatcatcccaatccagttgtaccgattagcatgtttaaaaatcgtgctttagttggagattttttactttttatttttagctggggagcttttttagctgtaaatacctatttgccaatgtgggcgcaaggattacttggaaccactgcattacttggcgggatgacgctaattcctaattctttagttgatgttgtagggactttagtagttaaccccttaaaagcacgctttagtaatcgaactctgctctcaatgggattaatttgtattttgatttcgtctttaggtttagcactagcgccgcaaagtactaacatttggtggttagctggtatcggaactttttctggctttggtgtgggttttatttttgttttacttcaaataaaagttcaggttgatgctagtgaaaaaaatatggccccagcaacttcactctcgtatttaattcgtattcttgctcaaacgataatggcagctgtttatggtgtaattatgaatatggagttagcgcggggtgtaagagagaatcatggaataacaatgagcatgcttaataaattaagtgatgcatcttccgcaaaaagtttgccgcaacacttgctgccaacgatgagaaatatttttcatttaggacttcaagaaattatgtggtgtgcgactgctctcttggtggtagcacttttattaaactttgtttttaataaaagcgataagtaaggatttaagatcaaatataaaatagttacagaaaatttagctattcttaataatttgattttttattaaaaatatcttttaattagagaagtaaattataatttagaaaagagaaggattcttattttagacgaacaacccgcccgatggggctctaaaaattattataaagttaaagatttatattatagtgcttttccggaatgggaaaggttttcttggttctcaatggtattaatgagttttcgaagaaaactaaagctgaatgctgtctatgatggagaaacattttgtgggatgatttgttactacattagtgattctactgtgtacttagcctatttggctgtcactgcagaattgcgtggcaatggatatggaagcaaaattttacatatgcttgaggaaaaatacccagagcagcaaattgtattagatattgaaccacttgatcctgatgcagagaattatcatcaacgtgttagccgattgcggttttatcaaaagaatggttggcgtagaactcaccagatgttaatcgatgcagatggtgaatttgaagcattagtagatcaaaaccattttgataaaaaagattttgccaaaacattgaaacaaatgagtttaggtttttatcgttttagaattgaaaaataatatttttagtcactcaattattgagtgactatttttttatgaaaaagtataaaatagtataaaaatagatttaaagtataaaatagtataaaatagtatgaaaataataataggaggtgagatacatgaacccatttaatcctacatttggtgatgtgcctaaaatatttttggatagaaccaagcaattggatactgtgatcaaggggttagaacatgaaacaagtccgtatcatactactttggtttacggattacggggatcgggaaagacaacttttctaagtgacatcagcaatcaaatgtctaaaaaagataattggattgtaattaacttagctgttggagaagatttattaattacattagtaaaattaatctatgatcggatgaacaataaatttcataagatatttgatcagctagattggcattttgaactttggggtattagctttaataaggaatcacagaagctggaaagtaacgatacaagaataatcttagaaggaattcttaagcaactaaaggctaagggaataaaagttttagtaactttagatgaagctcagtctacagtagaagtaaaacaatttgcaacaacttatcaactaatgagacgggaaaagtatgatatttttttgattatgactggcttaccctcagaagtatctgaattacaaaatgatgatatactaacatttcttctaagaagtggaagaataactttaacgccgcttgatgctataagtatgaaatatagctatctctctgcttttacaaaaggtagaagaaaaattgatgatgtcgttttaactaaaatggttagaatgacggctggttatgcatatgcatttcaattattgggatatctggtttgggatacggaagataaattaattactgataacactctgcaaactatattgcctgaatataaggaaatgctttttagaaatgtatatgtaaaagtttacagctcattatcaccaaaggataaagaatttatacaagctatgattgagagtgatgaagataaagttgctattagtaaaataatggcgaaaatggataagcctaaaaattatatttctatttatcgccgtagattaattgatgaccaggtaatcattagtaaagaacggggaagtgttgaatttacgttgccatattttgctgattttgttgaagaatttggtgatatgtattaaaaagtaaaaaggcatgaaacgggggattgtttcatgtctttttactaaagaatattatctgtaatgtaagtaaggacaccttggtcattatttgatgtagttgtatgatttgcaatctgtaaaacggccggatctgcatttgccatagcaactccatctccaacttccttaatcatttctagatcatttccaccatcaccaaaagcagtcatttcagataaaggaatattaagtagcgtgccgagctcctgtaagccgtgagctttatggattccaggctgaatgatgtcgatatcaccatgaccgctgcttgtaacatcgcaataatcaaataggttttcttttaagaaatttacataataatcagttttatcatcgggacaagaaatagcaaatttaacaatgtggtccttaatatctgctagatcattaatttttttaagatgataatagtagtgagttgatacatcatagtagcagactgaatatctaattggaaaatacgcactttcgactccagaaactaaaaattctagttctggttgttttaataaaaagttgtagattactttacttgattcatctgaaaaataattcagttttaaaatttctttttgatttctaacaatcgcaccattttctgcaacatagattacatcaggaaaatctttaaagaaagaaacaagttggtaatattgattgccactagcaacagtgaatttaatattctttctttctaattcttgataaattttagtgaatttttctttatcataagttttattatcatttaagaaagtaccgtccatatcaacggcaattagttttgtcatttaattatctcctttaactacgtattactggggtataagatctcaaaatatgtattgataaattgaactcattttctataattagttatgtaattgatataaagaggggaaaactatgaataagagttcaaatggttgacgcgtctttttaaagagcgtctggtttggtattattgcgggaatgatctctggaatggttaagattggttgggagaaaatcttaccaccgagaaccttagcacgtgatgttgttaatccaccacaacatatgttacaacaaatgggtgcatcttataaatttactcatgcttacgtaatttataatactgatcaaaaagttttctgggttgccttaattttacactttagcttctcaattttctttgcatggcttttgatttatatggtccaattcaagaaagctgcttgggctggcctatgggaaggggctttgtatggaatcattatttgggtcgcatggcatttgattattatgcctgtccttggtacaacgccagcaccttggcaaatgccatttgcggaacacttctcagaattctttggccatattgtttggggttggtcaattgctgcagtaggctactacttaattgctaaacaaaaggttaagactttaacaaatcaatattggtaaaaacatcaatcaatctttcattaggaaggtcgattttttgttaaaaaacaaatttatctagtgctttagcaatcccatcattatcatttgacgaggtaatgtagtccgcatgatcttttgcttcttggcttccattacccatagcaactgcggtaccaacaatatcaaacattgaaatgtcgttcttttcatcgccaaaagcaatcatttcatctggagtaatgcctatcttttcacccaactcttttaagccatttcctttattaacattaggatgtaaacattctaggaaatgatcatcagctcgaacaatataaagattcttgctaaatttttctcttagagtaggttcaacttgatcgaggatttcctttgaaccaataaaacatccctttgaaatttcaaaattgtctggcatttcatcaggtgttcgaatgaacataggggctgtattttcccaggcctgaagcaattcaaaatagtctacatcatgatcagcagtaataattcttgaatcaggatcaacaatattgaaagggactttttgttctttggcaaatttaattaaagcacgataaagcgcattgttaactaaatcttgagtcattattttgccatcagcagttctggtgattgcgccatttaaagtaactgcatattggtcgctgccttcaatacctagttctttcatgaagtgagctaaacctgcaattggtcgacccgaacaaagtacaactttaattcctaggtctaaggctttttttatagctctcttggttgaaggtaagattttattttttgagcttaagagtgtaccgtctgtgtctaaggcaattagtttaatcaatttaattcctcctcgtgttttatatatgattaagatatcatttataaatagagactaagtgtcgttttcgtaactaagaagtaattattttgaaagggattacaatgattgaacatgaagaggttcaaaataatcagcgactaccattttatttttattatgataataaagttatgcagccggaacattggcatcagggaattgagctgaactatttaattaagggaaaagatcttcgttttgctcttgaaggacagacttatcatttcaatagtggagatatttggttagttaatcggcgtcaaattcatagtgcatcaggtgaagcaggcgaatgggaatatgaggggttaattattgatgatgattttttattaagccagtatccgtcaagtattaactggaatcttaacttattaggtcagaagagtacaaaaaagaatcgggcatataatgaattggtaaaagaggtagcagaacttggttggttatgccgaaaaccattaactgatgctcgtcgttttatagtattaagtcatctgatgaaaatcattgttttacttgatcaaaactttaataataaagagcaagttgttcaaagtcccaatctagctttaggggatgagataattaagtatattaacgaacactttcaagaggatattcaagttggtgatattgcagaaaagtttaatatttctcatgtgacattaaaccgtcaattgaagcagactaataacttaagcatgggaaaatatctaaaattggttcgtttaatgcatgctagagaactacttttgaatacaaataaatcaattgaattagtcgcttatgaaagtggcttttctaacactagagttttaaatagaaattttaagtcttggaaacataagactcctacagagtatcgtaatgaatttagcaaatattttagctaagagaacttgagtattatttgtcaactacacagcaattaaacaatatttttagtgaattaaaaaactagagctacattacttgcagctctagttttttgaaatattcaattaattaaaatatttttgttcagatttttctttcttttcagcttcaagtgctttttcactggctgcttgtttaggtaagatccagttcattaacataccaaagatggtacataaagcaactgaagttaattggaagttaccaagttgtaggtaggccccaccaataccaataactaagatgacagaagcgattaacatattacgtttttcgccaaagtcgattctatcatcaactaaaatctttagaccattagatgcaatggttccaaatagtaagaatgaaataccaccaataactggcattggaattgattcgatgactgcagcaactttaccaacaaaactaaagataattgcaaatactgcagctcctgctaatacccaaactgaatgaactttggtcatagctaaaacaccgatattttcaccgtaagaagtagtcggaggaccaccgataaaaccagcaataattgttgaaagaccgtcacccatcatagtacggtgtaaacctggattcttaaagaagtttctcttagttagagagttaagaaccataatgtgtcccatgtgttcagtcattgtaacaaaggcgattggggccattgttaagatggctgctggataccatttgaagtggtagctaattccaggtacatctaaagcgggcatcgagaaccaagcagcctttgctactcctgaaaaatcaactattcctagaacgcaagatagggcgtaaccacaaacgattccaagcataattgaaactaaactagtgaagcctttaaaacacatttggaaaattaaggtcatcactaaggtaaagatggcaacaccgaagtaagttaagttgtacttggtacctttcatcatggcatcatttgcagcagtagttgcaagagatagtccaattacgataatgattggtcctacaacaattggtggtaagactttgtttacccaattagatccaacctttgcgataactaaggcaacgataacatatactaacccagctgcaattgcaccttgagcaattgctggataaccgtcttgcttcattaaagcttgcatagttgcaacgaaagcaaaacttgatcctaagtatgctggaatcttgaaacgggttagtagcatatggactaaagtacccacaccagatgaaagaagagcaatacttggattaattccgactaagattggaaccagaaccgttgaaccaaacatggcaaacaagtgttgcatggaaagtagaattccttgtcctaattctggcttctcataaacgtctaagatcgcatcatcattatgaaatgtgtctttaggcatctttttcataatttcctccttgaaattaaaatcttgatgacctaaagaaaaaacgactatctaaagaagtttcctttaagatagtcgtttctgtttaaaactatgtcaaaaaatagtttacgcgcagatttccttgatagcctcacgggactatattaaaggtcatcacattatttctttcttaatttaactaagatataagaaaaaagtcaagcgtaaaatttgattgttctaactaaggtacgacgtcaaccatatgaagggtgttggtgaagagattcattctaaggatttgcctgcaactgattgggactggattatttattcacaagggatgtacgaccaattaaagcgtgtctatgatgattatccattagttcattcgatctatattactgaaaatggaatgggttataaggataagtttgaaagtgaagataagataattgatgatactccaagaattgattatctaagacaacatatggaagaagttgctaaggcaattgaagctgttattctagtaaatggttactttgtctggtcacctcaagacatgttctcttggacgaagggttattcaaagcgttatggtctattctatgtcgactttaagacgcaggagtgttacgcaaagaagagcgcatattggtataagaaattagctgaaatccgagaaatccctcctgttgattaagaaaataatcatctgtaaaaagctaagtactgaatgaaagtacttagcttttttgatggaaaagtttaaaagagtttaaaagtagatatgaagtttaaaagagtttaaaataaaatatgaagtttaaaagagtttaaaaatgaaaggagacattaaggtgaataatccttttaatccgacatttggtgatgtccctaaaatatttcttgatacagatactagaattaatgatttaatttctaaaattaaaactagtgattttgcccgttcattttttattactggcgttaaaggttcaggaaagactgtctttttaaacgcagtggctcaaaaattggatcaagatgataattgttatcggattaatcttattaataaagataacctagtcgcaagtttaacaaaaaagttagctatcaagactgaatctgcttttcaaaaagctttaaataatgttaattcaattactgtaaaaggaattaatatcgatttgaacagttctgaaacagaatatgatattgttttagaaaaaatactagaaaaagtaaaaagacaaaataaatacgtggttgttacaattgatgaaattactaataccgaagcagtaagagaatttgcacaagtcttcaatgaattaaagggagataatttaccgatcttcgttttaatgactggacttccagatttgattttagatattcaaactcagaataaattgacatttttgcttagatcagaaaaaattcacacattaccgttaaaaaatgcagatataattgcggcatatagttctgtgtttaattgctctttgagtgtagcaagtcgtatggcgaaaatgacaggtggttatgcatttgcctttcaattattgggatttttattgtttgatcaactaaacggaaaaatccccgaaagtgcagatcttgataaagtttcaattccatttcagttgcaactatttgacaatgcatatcagaaaatctttattgatctatctgaatgggatcgaaaatatttattagcagttaggggagataagcgacttcgagatgtagtaaagatcttagaaaaagataaagtttttgtggcacaatatcgaagaagagctattgagcgtaaattgataatcccagccggatatggactagtacaatatacgcttccatattttgatgagtatttgaaacaaactgaagatcccgattcagcttattattggggatattaggaacaatatttgggggataaattcataatgatgtcatgcgtccactaagtataaaaggattagaagatagaaaaaagctagttttatattttaagcaaaagaaaattgatgtagcatattctagtccttttaagagagcaattgagactattgatccaattgtgaaagataagcaaatttcatgtcttatagatgaaaatttacgtgagcgtaaaattggtaatgaatggattacaaattttaatgactactgtaaaaaacaatgggaaaattttgaatatcatctttccaatggagaatctcttaaggaagttcaagagcgaaatattaaagctttagaaaatatcctagagaaaaacttgaataagactattatagtgggaagtcatggaacagctataggaacaataatcaattattatgattctagttttacttatgaaaaatttgtaaaaattcagccattaatgccatttgttataaaagctaaatttaaaggcttggtattgaaggaatataatttagatttctttttaagataatgttttttataatctcaaatatttcacctaatcaaatgaatcgactatgcttaaagtgagagtgtattttcatagaaaagagatagctatgattcaattagaaaaattggttaagaaaaatttacctaaagaaaaagaaggaaaagttgctagctatattccagctttagctgaagttaatcctaagcaactcggaattgccttatacgatttagaagatggtgaagtaggtgaagcaggtcaaagtgaagtacgttttgcaattgaaagtatttctaaggtgattaccttaatgcttgctattaaaaagatgggcatacaagaagtatttaaacatgtaggctcccgtcaaacaggttttgccttcaattcaattctaaatatggaaattgaaagagctaagtatccgttgaatccttttattaacgctggagcaattgctacaacttcgatggtagtaagtaagactggtgacgatgcatttgaagaaattttagattttgctcgtgatatttgtaatgacccagatctttacttagatcaaataatttatcattctgaaagaagaacaggcaatctagatcggtcattagcatattatatggaatctaaaaacatgatgctcggagatgtagtaactagtcttgatacttactttaagcaatgttcaatgatggtgactgcacgttctttagcaaatttaggggctgttttggctaatggtggtgtaaaaccatgggacaacaaacgcattattcctgatgaagaagcaagatgtattaagtcattgatgatgaccaccggtctatataatcaatcaggaacctattcacgactaattggtgtaccaacaaagagtggtgttggcggtggtcttatgtctgctgcacctcataaatatggaattgggatctttagtccagccttagataaagatggtaacagtatcgcaggcttagatttgttgagagatattgttgatggattagagctggatatatttgattaggtaagaattgaaaaattaatattttagaagctaagcatgcggtaagtgcttagcttttttgttaaattataatggattgtgttgagctctttagataagtggtaaaataagaaaaaacattattgaaaacaggagtaaaaatgaaaagatattcaaaagcgatatattggggcttacccattagtttgattctcgccatttcgattattttacacttaggttggattaatgcctttgataatttctttgaaggattagttcacattgttcctaatttaaagggattgatgctaaaaattacatttttagcagataccaaagtcgatttgatctggatggtattaattgccgtaatcttgtggtttagaaaacaacgtcctcttgcgactaacttagttttaacaatgattacaggggatgcagttggttgggtaattaagcatttgattcaaagagctcgtcctgtacaacacttagccgttgatgatggatttagttttcctagtggtcataccttaggtatggggatgattgttatttggatcattatggtgcttttaccagtagtattgaaggatagaactaaacgtttttggattgattttctattgattgtttggttagttattgtaatgatctctagagtatatgtttatgctcactatccatctgatgtttgcggttcagttgcgattgctttaacttgggttggagtaatgcaatttgtctttaaaaagattaagcaagtaataaataaatagttaacaaaatagggttaagcattaggcttaaccctatttgtgtgagtagtttttatgattttatttttgattaagttaattgaacttatttagtcaaacaatgtccaaggttgacttggtctgtcatatagatagcctttttgccagttccattcaggatgttgcttcatgaagtctttggcgtcgaatggttcaccatcggctctgccaaaaatgccccacatattcaagttttcaatatcagtggcatcagcacacttaccatcacatgaaccacctgggaagaaaggtacattccaaacgccatgtggatcgtcagcatagtattgtggatcaacatcatagtgagcacaaatattacgtgaagaagcgcattgataacctaagtatggatcatacttatcagctaagattctcttagcaacgccatcatcaatagttccagatacttctggaagtaattgctcaaagcgagttctacgagcaccagtttgttgacgagtatcattatagccattgtcaacacattcaaggttacgaatccgtggattgtgacaagcattacagccatagtagaaaccatcagttgactctaacaattcttggtgttttaatccttgttcaaaacgtgcgatttcaccagtattaatgttgcaaaggagccaaatgttagcgtagccaccgttgttgccttcattaaccaattttacccattgatcaatattatttgcatattgggtagctttacgtgcacgaataaattcaggcattccatgtacatcatagccaacaaagccagcgattgttgtttcagtaataccaagaccagcatcagtaacgtagaagtcagtcattgaatcgatgtagccaggaacagtttgcatcttaaatgcatgaccgttagttggatgaacttcttcacaaacgttaaagtattgaccactccagaaatcatcgaaactttcatgagcaataactggtttgccatctcttgtggcagatcctgtagcaacaaatccagaacagtgagaaccgcgtggtccttgaggtggattgttagaatagttagctgcaacttgtggccaccaatagccagttacttccatccaatcattccagccgataacgtcatcaacactggtttcaaacccgttagctgtgaagccatcagccataccttgcatttcttccaaatattcttctggaatcttatctttgtgcattttaactgcttgattgacaaagaacgagtaatccattccatatagttcaagcgtcatatgagtgtaaacacgcactgcatccctaaattcatcagttaaaagataaccatgttgaaaaccaatttcataagggtcaccttgaactgttaaataatgccaaccattaacatcttttttagtagcttttgcaacaattttactttgtgtatctgttaatgtcataacattcaccttcattttttaatcaattaaagactaatcagataacattgcagtccaatatggaagattgatttcagctttttcgtaagcagcacgttccgtatcagtcaaatacttcttgttgactactgtgttataggtatattgatccatccatgaattatccatgatgaagtagcctttatgaccaggtttatcaccccatgaattttgaaccttccatttagttggttcattatcatgtaaatcaacaccacaaattaacatggcgtgagttggcatactttcacgatattgaactctagtagctttgtctttgcctaagctaataccaaatgaacgcttccaatcataaacctttaaagaaagtaaaccagcaggattattccattcttgtaagacatcacaagcaaaccaaacaggttgatcatcttttaattgatctatgaccatccgtctcatatcgtgcattggaacatttaagtaacgaatatttctaccaccgactacgttattgcatagttcaataccataggtttggttgtacttatagccgccaccaggtaagttcatgagttcaacatagtcatctaagttgatatctgcaaacttcttgtaaaattctaacggtgtaacttcaccagtagtatgatacttcttattcttatcacgatattcataagtgaatttttctggaggagtaccaaagcagatgctcaatacacgatagttttcttggtttagttgacgaataacgcttttaatctttgtatcagaagcattgctgttaactaaatcacgtaatttcattgcgtctttgtctaattttctgttatacatctgattaatctcagttgtattccaggctggggttgtttctggcatgagttcgtttggaactagaccatatttttcaattaagttagttaatagtggccaatcaccgccatcttcttgaggcgtagcgaggaggaacataacttcacggtcagataggggcttagcagcggtcttaacaatgttgttgtagaagtaattaccacgttctagcttgtcgtagaagaataggtaatctggagacagctccatatcttttaaattatgcttcttttcaattaagaaacgaacaaagttcaaaccactaaacatccagcaacgaccagaatgtttttgattcattactttatttgaatcaacatcaattgaaaagttaaaactactattttcaattgcacgttcattagtaatggcttttttaataccatttttcataactgcattttgagtaatacgtaatctttgagtatcaagaaagtctgatctgattgttttcaaatcagtagggttaatttcagacataatacaatctcttttctaatataaaactaattgtcggcatcagatgaggtaagcttattgtcttcagcagccttgacaactttagtggatacttgtgcatcaggactgtaaggacgtttaataggcatacccattggattttgatctttagacataatatcagttggaacgttagaagaaacttttcctggtttcttcaaaccttcgatttcccaagtaaatggagcgaatttgttggttggatcaacccaattgtggtgttttgaaagttgatacataacaaaacaaatacctaaaattactgctactaaaatcaaaataactgatatgtaaacaactggagaaccaacttcagctttaacttgtgctggtgggtagatggctaaaataatcccgaatatgctagaaagtaatcctagaccagcaacaaaccatgcaccaaatttaccaccgggaaccttaaaggcccttggacggttgggttggtcgtagcgtaatttcaaaaatgtcgtaaacattaaaatgtaatagaacaaatataaaacagtgatggtttgagtcaacataatgacaaaaccttcaacatttggaagtaacttgactaagtaagcaataattgtcattccggcaatttgggtatacatcaagtgagcaggcatttcatgtttgttcttttcttggaaccaatgtggcaaaaaaccagaacctccagcttgaccaagcataaatgaaggaccagccatattggtaataacactagctaaaacattacataaaccagcccaaactagaaccatatataaccatgggattccaatcgtagcacctaaggttctaaagactgtgttcaaagtataaataacattaatctgattttctggtacaaccatcgcaatgattacagtaccaacaacgaaaattaagaatactaagatcatagaaataaacatagccttagtaaagtctttttcaggatgttttaattgcttaatgtgagcggcattcatatcaataccagtatatgagaagaatactccggcggctaaagctaaagtagacattccgttccatttaggaattaagccttttggagtcattggaattgctggttggtggccttcgcataaccaaacaatggttaaaataatcattaaagccaagggaataaaggtaccaattaaaacaccatattttgctacattagcaaatgctttgacacctttggttgcaacaaatgttaagacccaatataggataataaatccagtcataattaaaacttcatgttgaggatgctgtgcaaattggacagctttatcatacatgggagtatagaacataattgttgcagcataactaggcattcccattccgaagttgatcatggtttgaaaccatagaattagtagacaagttagtgcccaacctttccccaggccttcgccgacccatcgaaagataccaccacgattactccaacctgatgctaattcagcggctactaaggctgtaggaatgaagaaacagatcgcaccaatggcaaagtaggttacagaagacaggccatagaaagcttgttgaacatcattaccgatccccgcgataatagtaacgttcattaatgttagtgcaaggatagaaatataaacctttttaaccgatttcttttccttgtcctttgcatcttccatcattatttatcatctcctaaataacatacgttaaagaaaaagctaggtgaattcacctagcttttctttaattttgtaaacgatcagtattaatggagaaacttaaacgagataaagttaattcatgttttactaaatttccgacagttttatgtgtaaggtcgagaaccttttgtgcattagctgcgttagctttagtcaaatattgaattagcttttgcccacttaatttttcagcttccaaatcagtttgatgaactaagtgatttgtaagttgatcggcagtaggtaaaaatccatctaatccaattaatagagatttcatttcattgtagcttggttgaattaaagcagcaatcgttcttgataaccaatatgcttcgtctgcatcatatgcgtcagtagtattctcatattgaggagctgtaccattagcattagcgtagaaaggaacataaggattaaatgcagttggagcaaaattaatccaagcaattccagcaattccagctggaacattatttctaatttcgagaatatgtgattcagcacaccttgccatagaaattggacggaatttagttctgtcatcttttggagtattgtcagctaatggatcatagattgtttcgttatagtgagaactaagaacatagccaacatcttcacgttttaatttccgatctggtttaaagctaaaatctaggtcgttgctggtaggtgagaaagcaatatgacctaaataacgttgaccaaaccaaacacgtggtgtgttatagcaacgatcacgtgaattagatgtaccaaaaatatggcggaagttaaattcatcaggatcagggttaagattattttcctctacaaattctctaatgccaggagcccacataaagcgactactgtcatcaaagtcgatatcttgtaaggaaacttggttggctattacagcagctttgtcatcatcaagtttttctgcaacccaatagtgacctgttggaatttccatataccaaatttcatctttgtcactaaaagcaattccatttccttcatgagaaccatatttttcaattaattttcctaggtattgaacaccatcgcgagcagaatgaataaatggcaatactatacttaatagagcatcttcaccaattccattacttactagtggatctaatcccaatacttgaggattcccatataagctttcagtagcactcatagcaacgttttcactgttgattccacattcaccgaattgaccgtgaattttataatcaacaaaaggagccatttggtaacgaagtgcattttcaggtagaggaatatctaatcctgttacatatgaatgaaaagtttgcttttctgatttagcaggaacaactacaaactttactggcacgttacatacttcagcgtcacaatctcgtgcaataattgtcgaaccagcaatattggcttttttaccaactagaacagtggtacatgccatatataatcgtcctttctaaagatatttttctctttaaattgggttcattgcgttccagtatggaagcattactggttctttttcataagcagcaagttgttcgtcagttaagtacttcttgttgacaacagtttcgtaggtgtattgttccatccagtcattgcccataatgaagtaacctttgtgaccaacttttggaccccaagagttttgaatcttccatctaattggcttgtcatcacgcatgtcaacaccagagataagcattgcatgtgttggtaaactttcacggtattcaaatctcttagtcttgtcagtacctaacttaataccaaatgaacgatcccagtcaaagactttttcagttaaaagaccagcttgtggtgcccattcttgaagaacgtcacaaccaaaccatacaggttcatcatctttcaattgttcaatagcagtcttttccatatccttcattgaaacgttgaagtaacgacttggttgtccaccaaccatattgccagaaatttcaactccgaatggggtgttgtatggatacttttcacctggtaagttcattaactcaacatagtcacctaagttaatgtcaacgaacttcttgaagaactctaatggagtaatttgaccagtggtgtggtattcattgttttcgtcacggtattcataagtgaatttctctggaggagtacctaaagcaatagctaatacacggtagttttctgcgttcatttgacgaagtacactcttcatcttttcatcagatgcatcactgttagctaaatcacgtaacttcaaagcgtccttttgtaactttctgtcatacatacggtttaattcttgagagttagcactaactgcatcttctggcatttcttcgattggaacaataccgtacttttcgattaagtcgactagtaattgccaatcaccaccatcttgttgtggagtagtaagtaaccagttaactagacggtcagacaatggacgatcagctgtgttaataatgttttggtagaagtaattacccttttctagcttgtcgtagaagtaaacgtagctaggtgacaattccatgtccttaatgtggtgctctttttcaatgtggtaacgaatgaagtttaaacctgagaagtcccagcaacgaccagattgtttttggtttaaaactttatttgaatcaacatcaattgagaatacaaatgggtgagaattaatttcactttgatttgtaattgatttcttgataccgttcttcattacggcattttgagtgttacgatactttggtgtatctaaaaattctgatctaacttgttttaaatcttcattatcaatttgtaccataataatctcttttctttaaaatcgataatctatttaactttcatcagttgaaatctcgttgttttcatcagctttaacaatgtcgtcggatacttgttcgtttggcttataaggacgcttgattggcatacccattgggttttgatctttagacataacagttgttgggacgtttgataaagcctttccaggtttcttaagtccttcaatttcccaagtaaatggggcaaacttgttatttggatttacccaatcagtgtgtttctttgaaagttgatataaaacaaaacaaactatcaaaacaacagcaactaaggctaaaataacagaaacataaactattggtgaaccaacttctgctttaacttgtgctggtggatagatagcaagaacaattccgaaaaccgatgaaattatacctactcctccaacaagccaagccccaaacttaccacctggtactttaaatgaacgagggcggttaggttggtcataacgtaaacgtaggaaagcagtaaacattaaaatgtagtaaaacatatataaaacagtgattgtttgagttaataagataacaaatccttcaacatttggaatcagttttactaagtaagcaacaactgtcattcctgcaatttgcgtatacattaagtgtgccggcatattgtgtttattgttcttttggaaccaatgtggcaagaaaccacttcctccgacttgacctaacataaatgatggacctgccatattagttacaaccatagcaattgtgttgaaaagtagagcccaaacaagaaccatgtacaaccaaggcatcccaattgttgatcctagaatcctgaatacagagtagagagtgtataaaacattaatttgtttttcaggaataatcatagcaatgattacagtaccaacaacaaagattaagaaagcaagaataattgaaataaacattgcttttgtgaaatccttttcaggatgttttagttgtttaatatgagctgcattagtatcaatacctgtgtatgagaagaatacaccagcagctagtgctaacgtactcataccattccacttaggaattaatcctttaggtgtcatcggaataacaggttgatgcccttgagctacccacacaatagctaaaataaccataaccgctaaaggaattagacttccgataataacaccgtatttagcgatgttggagaaagctttaacacccttagtagccaaataagtaaggacccagtataaaatgatccaacctgtcataatcaacaattcatgttgtggtgcttgggcaaacttaacagctgcatcatagttgggtgtatagaacatgattgttgctgtaaaacttggcatccccatcccaaagttcaaaattaattggaaccacaggataagtaaacaggttagtccccagcctttacctaaaccttcaccaacccagcggaaaattcctccgcggttactccaaccagaagctagttcagccgcaactaaagcagttgggatgaagaaacaaatagctccgattgcgaagtacgttactgatgcaagtccatagaatgattgctgaacatcgtttgcgattccggcaactatggaaacattcatcattgttagggcaaggacagatatataggtctttttctgttgagttttattgtcttccatgaaaatacccactccttctaaaaaggcaaaagaaactaactaaaaagatggttggcttgtgaatctcttttattagcaacatatgttattgataaaaaagagtgttagtaaaagatagtagttcacatgagttttcatcaaaatagaaagttaacaaaataaatagatatttatataacgacttgcaagttaaaataataattatctattcgcctattagattaggagttaaaaataaaaaaagcaaataaaaacaatcgtgataaatgggcttttttacgaaaaatgcattatattaactaatattaaataaaataactcaaacaaaagctgataaaataataaatcgaaaaaattcttaaaaaatatattcttttaagaataattattattttgtaggtaaatgaattattttttgaattcgatttcttttatttgcttttaaaaaggacaatcgttatggttgagatgagagttaatgttttagaaatataaatgaacagtttcaaaggtggtaagtactatggttaaaaaaactgttcctaaaaagttaacttttatgtcaatttactttttaggaattaacggaattataggatcaggagcatttttacttccgcaatctatttataaagatatggatctattgagtgtagttgtcttactttctgctgcattaacggtagggttaatcgcattatgttatgcggatttggctagtcgttttaccggttccggagctgcatggctatattcgtacaatgcatttggtagatttgcaggctatgagcttggtgtatttacatggtttttgggctgttgtacttatgctgctgaagtagtagcatttttaacaacgcttaaaagttttgtacctgcattcaatcaaagctcagtctattttgctgtcgggataggattagttttattgttctcaattattaatttctttggtcgtgccttagttaaaataattgataacacttcctccattgctaagctatcaactattattttgtttattattgttggtatgttcttcatgcatattgcaaacttccatcccgttttaccagccgcagctgcaaagggtgtaggaccatttttccatcactttggtgcagcctttagtgttgtgttttatttgtttagtggtttctcatttattccaattgctgcctctcagatgaaagatccagctaaaaatattccacgggctttagttgctgttatggttacggtaactattctttatactttgatggtattaattgctattggtattttgggtcacaagatgtcatggtacaccattcctattgctaatgcctttaagtctgctgtaggagaatggggctatgtgattattatcattggagttttgttaagtattttcggtgtggcatttacgtgctcgtttaatacaccagctttgattgcttccttagctctagaacaccaattattaccaaattgggtaggaaaaaagaataaatttgatgctccatgggtaggtattattttaactgccgctgtaaccttacttttaattactcaatcatacttgttcttagttggatgtattgttttagcttcatttgttcaatatgtaccatctatttttgcggttattaaatttaagcatactggtcaatatccaaaccatggctttaagcttccaggtggctacacaattccaattttagctttattagtagcttgctatttaatctttaactttacttgggaaactattttactctcaatagttgtagctgctgtaacagctgttttatacctgttcttaggaaagaagagattagctaagatgggcggaattccaactgcagttagagagaaaaagaatcatatagaagctgatttaaagaagaaaaattaattgattcaaattacgtttatttagaataaaaaatcaatttgtataaataaaaacagcatttctcggaggtattgagaaatgctgtttttatgctatttggaaagattttttacaacattaaaattaaacaagattaagtttaagacaacaatccctgctgtcacaatgaaaaccatactatagcttgaaattccggcaatgaaagatcctagaagaggccccgcaatatttccaatatacattgcactctgattccaagaaaaaattcgaccagtaacggcggcaggtgaatttttggttagtaaagtctgtacttgtgggaaaagacatgcgtcagtaaaaccaactaaaaagcgtaaaatacctagttgtactgtattgtgaacaaaggcagtcaaaaagaataaaattgttgcaccaataaaaccaccgataataattttgtgagtgccgattttatctcctaatgcgccaaaacgtgaagcagctaaaaatgttgcaattccaggtaaagcggcaataattccagaaacaaaaacaacatttccatgtccactcatcaattgtttaacatatagagaaacaattgggttaattgaattgttggctgcttggataattaaagtggttaacagtaaaccaaatatcagggttggagatcgtagagtagcaataacgccgctggctttatctaatttcttttctgtaatcggcttaaatccttcttcatggacaaagaaaagtgagagaagaaaggagattaataataatcctcctgtgataaagaaagtaacgcggtaactaaatgcagacgcaagtgctccacctaagaaaggcccaagtaagttcccggcagtaaaagaagaggccattgttcctagcgcttgaccagatttttctttaggtgtttctgtagcgattaaagcatttgaatttgaaacaaatcctgcaaaaactccctgcaacattcttaagaaaaatagttgccagacattagtaactaatcccatacttccaaggacaagggccatcccaagggaagccctgagaatcattagttttctaccttttttatcagctaatttaccccaccatggtgaaataatagctgagacgaagtacactccggaaaaaataaatcccgaccaaaagtttaactgttggtgagtaaaatgtcctaaagtatcgatatatagaggtaggaagggcataatctctgaaaatgcgattcctgcgataaatacggcgatagagagaacataaagattctttttccaaattggcttatctgattttatcgtaattctcatcctccaattttttaaaatctaccgttttatttttaagggatatttttcctactttgaaaccataatcgagtaattcttttttataagttaagaaagaataatcaattggtaggccgacaatcttttgaatttgattaaaagataattgaaagtcttggtcatgattatctttaatatattgccacaatggtaaaaatttgctcattagtttttctttctttaaatctgcttttccaaattgattgaaatcttttcaagtttagctaaagtatcaggatctactgttccaactagttgatttacttcttcaaaggcgtcgttcacttgtctaagaacctcaactccagctggaagtaagaatagttgtttttttagtccattgtttggatctgatcgacgttcaatcatttttcttttttctaatagcttaactacattagtaaaactggcaggttggtaaaaaagataatccgcaacttccttttgaatgcagccgggatgcttttgaatgtatcttaaaacatgggcatgcgtcattcttagattaatggaagctaggcgttgattgattaataggttttctaatttaccaatatgatatagcaaatttgctaagggtctttttcgcatagttttgcctttctaagttgtaattacaactaatactttaaataagtataacgcaactaattgtaattacaacttattttttaattcagagaattagtaattttagaaaaatcatacttacgatattttaacgctgcttttttgtctttaaacatagcactatgaatgtcaccggaagaataagctaaataaagacactcatttcctttaaaagtacctgtgatatagatgatatcaacagtatctaaaaatccacgtgctcggagccactgcgaaccatttttatcttcaaaagagaccatacttgcatccccagcataaactttattatttttttctgagcgatggtttaggtttaggtttggatctgttttttgataaacaactgaatccataatagtgtgcttagttataatgaattttctcgctgttttactgtagcgatcagtttgataccacgttccttgaaatacagtaggaatcgtagctaacttaaaaccagggtattctttatttaaattaggtttagaggaagttttagtggtagttgaagatgctgagttagaggatttagactgattatttttagaggtattactgcaagcagtaagtagtaagatggagaatagaattaaagctacttttttcatggttttttgtctctttcattgaatacattttctcataagtatagcagcaaaataccgattaaataaagagacctatttattcttattagctaaagctgagtagcctgcattatagtaaaaatccccatcgttcttcttcggaatcaaaccgattataaaaaccattaaaaatccctttaaaatggtatttatcatagtagtatttcatatatttcataaagagtgggcttgcggtataccaaaaatccattccggcagcatttgacattccgctgccggctccaatgataattgcatctgcttcattcacttgagctatgagttcattgattttatccattatgacctcctgttaaacatattgtttatttttgtacatactgtattgaattttcactagtagaataaaataaacaggtgatctaattaagcacaacttttcaatatgtgaataattatggacagtttttaaaatatgtagtgaacttaaaaatgcaagtatacatggacacattaagaatttaggcaaaacaaaaagcagacgttctgggggattagaagtctgctttttaatgtcgtatgttattttgggagaataagtaaggtgtagaagtccccttacttgttaaatagaatacctttctttttttaaagaagatttggtattagatttaaaatttgcaaagaatttctttaaaaagtttaaagacataaatataattaaaatagaagcgtttgcgagagggaaaattatgaaaaaagaacaagaaattcaaatgttaaaagaattttcagatgcaaattctacatctggatttgaagaagaatttgtaaaattattttctacttatgctaaaaatactgctgatattacggtagatgggatgctcaatgtatatgcagctaagaaggaaaataaaggtaatcggcctgttattcaaatggatgctcactctgatgcagttggttttattacccaggcagttcgtccgaatggattaattaaatttgttccacttgggggttgggtaaagtataatattccggctttaagagtgaaaattcgtaatcgtgatggtgaatatattcctggtgtagtggctacaaagcctccgcactttatgactgctgctgaaagaaattcaattccggaagttgcagatatgtcaattgatgtaggttcatcaagtagggaagagactattaaagattataaaattgacactggttgtccaatttttgttgatgtaaaatgcgaataccatgaaaaatccggtttattcttcggtaaagactttgatgatcgctttggtgcaggagccatggtagacgtcttagataatttgaagggtgaagagactaattttgatgtagtagctgctttatctagtcaagaagaggtaggacttcgcggtgcatatgtcactggacgaaaaattaagcctgatttatgtattgttttagaaagttgtccagctgatgatacttttgagcctgaatggttatcccaaactggcttaaaacgcggtccaatgctcagagatatggacactacatttttaccaaatcctaagtttcaacagtatgcttgcgatatagctgataaaaataatatttcatatactcgctctgttagaactggtggcggccaagatggggcagcaatttattatgaatatggagctccaacaattgttattggaattccggttcgttatgagcactccccatattgtttttcagcatataaagactttaaggcttcagttgatttagcaactgcaattattcgtgatatgacacaagaaaagctagatagttttaaggtgatctaatggactggaaagtatttttcaaaaaagtagcaatttttagttggtgtatggctattattagtgtattgatttatattgttcgttatacagcaagtgaaattggtaatctttttatgtggaatcaaccatttatttgggagctaattttcggacttgttttttgtctcttatcggttttttggccgaagaaaaataaatagaatataagttatagatatgaaccccgaaactaagataagaatttcggggttcatatcgtttataataaaaataaatatttatatagaaggttagctatgcatcttttagaaattaaaaatttaaattattctgttgatggaaatgctattctaaaaaatattaatctaagcgtaaattcaggagactttttaacgattgtagggccctcaggtgcaggaaaaagtacacttttaaaaattattgccagcttacttacacctacatctggttcaattgaatatgagggaaaagatattggtcaatattctccgcttgaatatcgtcggcaagtttcctattgcttccagcaaccatctctttttggaaaaacggtaagagataatctgatttttccttaccaaattcgaagggaagaagtcaatgaagagcatctaagtgaattattagataaagtaagtctaaatcagacttttttgaagaaaaatattaattctttatctggtggagaaaagcaacgagttgccttaattcgaaatttagtctttttaccacaaattttattattggatgaagtaactacaggacttgatgagaatagtaaagaaattgttcatcatttatttgatgatgtgcgcaagaagcatgttactatcttacaagtaactcatgataaaagtgaaattgaaaaagccaataaaatttttgaagtgaagaaggcattcctcaatgaaaaacgtagttgtcagtaactggtccctagtctttgcattcttattagttttagtatcaattggaatttccgttaaagaaaagctaggccttactaaagatattttgattagtgttgtgcgagccattattcagctagtcattattggatatattttaaaagtaattttcaatgtaaatactttttggctaacctttgtttctacacttgtcattatttttaatgcttcatggaatgcgaatggtagagatccaaatactaatcgaaaattatggaattcaattatagctgaggccgtaggaacctacattacattggctgtattacttctttctggcgtcattaaaccgatacccatgcaagtaattccaattacagggatgattgcaggtaatgaaatggttgcaataggtctttgctataaatctttaaacgaaagttttcatgatttaagacagcctgttttagaaaggttagctttaggtagtgatattaaaacggcatcgatgccaattattcggcgtagtattaagactgctatgcagccaacgatcgattcagctaaaacagtagggttagttaatttgccggggatgatgtcaggattgatctttgctggagtaaatccaatttatgcaattaagtatcagattatggtaacttttatgcttttatctgctacaagtttaggagcgattatttctgtttatcttgcctataaaaattattttaatgatcagatgcaattaatgctctaacaaaaagactgttctggtattatttcagaacagtcttttgaattatatgaaactaaaatttaatgtattttattccactctagcgatttcatcatgaactttaatattatgggaacctaaacttggctcttgaccatgaagattaaatttaacattaactcctggtctaaacaaaagaacatgagttgagccaccaaagtggaaaataccaagttgatcacctttattaatatgctgaccaactttaacagtgatttcgttgcccgaaacttctgccatacctacggctacaaagcacattaagccaatcttagggttgtctgctttaataaagatgacagcgcgtgatgcagtttcggtaatgtaagcttgagaatcattaggagcagctggatcagggccattaggattttcaaatccttgtggcaaagtttcagagtagtaagaaccgtataagttataagctttaactactgttccgctaactggactgttccatctgtgataactcaatgcactaaggaaggcctggtaaagtgtaccaccaacaaattctgatgttaatggatcattatggagtagatcaattaatgaatatggttgtcctttaatccagaatttagcctttaaaggtaggttatgggcgattcgatatggtgctgattcacaagcattagcaattgaatcagggtcatcggcattaacaactggacgaacacctggattaaatgttctagtaaagaagtgatcccaggaagtaaaaccatattgttgatcaatattatcattaggacaagcaaaaatatcatggaaatttttaccataagctgcgtcacacatgctctttaaagcttcatctccaagccaaccttcttgggaacgattgagcacataagtagaatcaggggattgtaaaaatttgccccaataatctaaaatatcacggagtttttgattaacgcgtggatccataaaagctacatagccagcttttgttgccattggataatctagaatagcattaatagggaaaccaactaatccagtagcattaaattctggagcacggtgcatcacccgattaataacgcgaagcatttgatgatagttgtgaacagcaggagtattcattggagttttaacatattttactggaacctcttcaaacatcatatggaataaattccaaagatagcggtcagattcaattaaatcttttagagcttgaacaggtggtaaaagagtttgatcttgttcagcttcggcttctttcaatactttttttaaccaagtattgtaaaattcttggtcactaggtaaccattgtccaacgttaaattttacatcttttttcatttttaacactctttttaatattaataactataatgaaatcttttttgtaataagaagataaatagagacaattgctaaaacacaaataataatagctaatgccaactcccatttgttaaataaaggagtaccgtctttgtcatattcttttcttgcaaagtagtagaagataatacctacagcgtaaataatagttgaaattaataagtagttaagcccagctgcatataggagccataaacaataaatggtggataaaattcctatgaataggctcttattacgcttgtgagaatcattagcaaaaatttctcgtttttgtgcaattttccaaagatacattgaacttaatagataacacggtaaaattattaccccagtaatatcaatacatgcaagatatacgttattggctgttaccactaagatcataaataaggacattaaaatacttgaaatatacaaagatacactaggtacttttttcttattttcatgagcaaagaattttggcaaaacatgtccctttgcggctgcgtatggaagttgtgccatcataacagtccaagcaacccatgatccaccaacagaaataattacagagatagttacaaagtctataaaccaaggaccaagtaaatttttcattaagtaagctgttgatgggtcagttaatttagaaagagttggttgatgataaataccataagcaacaatactgattagaacataagcgataagtgaggttaaatatcctagtactgtggctttaccaacatcttttggattttttgcatggttagaaataactaccgcaccttcaataccgataaagcaccataaagttacaagcattggagccttaatttgtgagataaagtttcctagatgcaatccttgtccccagaatccccagaaaaatgtaggaaaacggaagaagatcaacatacaaattaaaataatagccaagctgataaacttgataataacggtaatagtattaagaaaggttgcttctttaacaccattaagaactaaaaagttataaatccaaattaaaacaattccaaatacaactgttggccattggtgttttaataaaattggaaagtaacggccaaatgagtcattaagcataactgcataagcaacatttcccgtaattgcttcaatccaatagccccatgctgaattaaaaccaacatatttaccaaatccagctcgtgcataggaataaataccaatactcaaatctggtctttcttcggcaagaattttaaaagtaaaggcaagtccaaacataccaataccggttaaaacccacgctatgagaacagcaccaagagaggatgaagcggccatattttgaggaatatcaaaaatcccgccaccaatcatagcgccgactaccatagctattagaccaaagagaccaattttatgacttttagctttagtcattttgagatcttctttcttttaattaaaataatagcttatttaacacgtgctatttcttcgcgaactttaatgtttgaactacctaaaccaggttcttgatcatgtaaattaaattcaacctttgtttctggtctaaataaaagaacgtgagttgaaccgccaaagtggaacatccctagttgatcacctttattaacatgttgaccaactctaaccgtaatttcatcacttgaaacttcagacataccaacagctacaaaacacattaagccaatcttagggttatcggctttaatgaaaataacagcacgagtggcagtagcagttaaaaaggcctgagagtcatttgctgcaactgggtcagcaccacgttcatttgcaaaaccttggtatagactttcggagtaatatgatcctggtaaattataagcttttacgatagtaccactaactggactgttccatctgtggtaacttaaggcacttaagaaggcttgatataaagttccgccttcaaattttgatgtccagggatcgttgtgtaatagatccattagagaataaggttgtcctttaatccagaattttgctttcattggtaaatcatgcgcaattctaaatggagctgattcacaggcattagcaatagaatcaggatcatcaggatcttgaacaggacgaatgccaggattaaataaacgagtaaagaagttgtcccaagaggtaaaacctagatgcttttcacgatcttcagaagcgcatttgaaaatagtcgtaaatttgtcaccatctgctactttagccatttcatttaatgcatagtcacttaaccaaccatttttagatgtgttaagaacatatgttgagtcgggcgtttgtagaaatttaccccaataattcaaaatatctctaagcttttcattgatttttggattcatgaagaatacataacccgctttagtggccataggatagtctaaaattgcattaattggtgtaccgactaatccagttgtgttgaattccggagctctttgaataattcggttaagcattaataacatttgtttataatttcgaacttgtggggttcccattggagtatcaacatacttttcaggaatttcatcaaacatcatctgcgtaacattgtataaataccgatcagattcaattaaattctttaaagcttgaactggaggaagtaatttttgattttcttcactttccgcttcttttaaaaccttttttagccatttattgtagaattcttgatcactgggtaaccattgacctacattatattgaatattctttttcataatttctacctcaatatttatgaaaaacagttaataatatttaaaagtgcactttcatgttaaaaataacactaagaagagaaacagaccaaatatctagtacttttattccaatatcatatataagtaataataaaaaacagctgacttttacatcagctgtttttgcatacatttaatttgaaaatataactttaatctttagccgcatcacctactatactttcttttgatttactgttttcttcactaccattttcggctttaagagcttgtctatctaaagctttgaagaatggccaataacaaacaacagcaaaagctaaacaaattgcttgccaaacaactgctttccaatcaccaccggtaattaagaaaccgtttaggaaaataggagtagtccaaggaacactagcaataaccatatgaataacgccaaatttaattaagaagtatgaaattccttgtagaatcattggaactaagataaatgggatagataacattgggtttaaaacaactggcataccaaacataattggttcagaaatttggaagatacatggaacaaaacccaaatgtgctagttgcttataacgtttactttttgcaaacatcatacaaataactaagcctagaattgcaccagtaccacccatattcataccaaagtttaaaaatccatcggcagtaatatgagtagctgcagcaccgttcatagctttatgcatattgtccattaaaaaggcaccgtaaacaggaccagaaatagcaccaacagtgttgtttccgtgaataccaattgtccaagcaaataaagtaaagaatagtaaaatttccattccccagaagctgcctaaaccaacagtaagtggtgaaaagatccaagtaataaaggcattaatgtctaagtggaataaacatcttaaaacccatgctaagcctaggataacaattgcaggaattaaagaaacaaaggaactagcaactgctggtggaacagaatcgggaagtttaattacaattttatgtttgatgaagaaatcatagattgttccagataatagagcaattacaattgccgtaaacatactagtggaacccaaatttgctggatctagaaccattttgtcgtttaattcacaaataataaaagcaattgcgccaataactgaagcagataacttatcaattttattttcacgagctaatgtataagaaataccaattgccacgattaacccgatcatacccgtagtcatattaattggtgcatttaagattgggagatagggcttaataatattgttccaaccagtgatagggagattggcgataatcataaagattgagccaaaaattgtaaatggtacagaaataatcatcccgtctctaagaacaatcatatatttgttattaccaaattttcctagagctggcagaacttttgacctgacaagggtcataaacttactgttttgcatgagtgagacctccaaaataataatcactaatcatttaagtaagtaaagttaattaactaaccatctaaaatgtaagccctttctattaaaatgtcaagaaatattactaaaattataaaaaaccgcttatgtctaaggaattagacgtaagcgttttgtacctaaatggaagacttgtctcattaaaaaagaatagcttccaagtaagggtgcaaaggtagattgccgagatatttctagttgtgtacctgtattttgtaaaattggtaaattatttcgcaattggattaacaagagtggaaggttttcaattaaggttgaatcaagaaaaacaatttgaggggcataactagcaattaaattattaagcacaagcgagagtccttgtataaattgttttatcgacgctactactctcggattaccttgaacatataattttgatagttgctgtaacgaaagattgtttaatcctttctctttatatacttcttttagaattgcctcttgagaacaatattcaattggattaatttggactattttatcatcagttgatagtaaaaatttcatatctgcaatattgccagcagctgcttgattaccaaggtagaggttttcgtcaattataatacctgcatcaatggtttcgttaattgtgagtgaaatcaaattcttaatttcattatttgaagaaaaatctctttgaaaaattgctgctgcattagcgctatttaatagaatgacaggaacctcaaagtttttttctaaaactttaggtagatcaatatctttaagaattggcttttgagaaacattattgaaaactcgatgatgaacggcaagtgagatgcccagaagactatgaactgtactctttaaagcaaaattatttatctttttattaattatctgataaatctgctcatcacttttatcaatagttgatatttcttcaaatcgtgcgatttgtccgttggcccatgtagacataatatttatgtaatttttgccaatttcaatattaataaagtagccaaaatttttattaaattcaattaatttaggtttgcggccaccgtttttggtactttctccttcaccaatttctacaacatattgctgtgataagagatcctcaagaatacttgaaatagttactttgttaattgaaagatcacgagatattttacttctagatattggtccataattgatgacatgtctgatgacagagcgttcattatttaagcgcattgtatgtttattgatgaacatagtcctagctcctttataaatatatttattattatacaagttttattgtatgaaagtgtttacattatttaataattagtttatgctttacttgtaacgtaagtaaagataattaactaactcaaaaaggagaaagcatcatggcaatcttaacaatggatattggtcaaaagtttattcgctatggtttctttgatgacaaaggaaatcttactgagaaaggccaatatcaggttccaagacaatcagctgaagatttttataaatcaattgctgatttggtagatgaaagtgacatggaaattaaggcaattagtattagttttcctggttttatcaatgtaaaagataaagttgctattcgtgcaggttccttaagatttttagatggacataatattagtaaagatttacatcaatatattaataaagagattgaaatttttatcgaaaataatacaaattgtgctgcaattgctgaaaaattaaacggaaacgcacaagatgttgaggattttgtagtaattacattaggacatggcgtaggcggggcaatctttgttaacgataagttgctacgaggatctggttattctgctggggagtttggaatgatgattaccgactattcggcgcggcaatttatgacagctcacgagctagcctctacttcggctttaataaatgattatgcaacgatgcgaggaattcctagtgaattaatcgaagagtatcaaattatggctgaacttgataatcctaaagttcgagaagtaattgaaaaatgggcaacttatgttgcgatatgtatttttaatttagcttgtactttgaatccgcaacgatttttgattggtggagcactaagtcaaaataatgaattaattccgcttattaaaaacagactgatgcagataccaaattggtcagactttgatacagaaattcaatcctgtcgtttttataatgatgcaagtctatatggagcctactgggcatatataggaagtaagaaaaatgtatcataaacaattagacgaatttcctacagattttttgtggggagcaagttctgcagcttatcaaatcgaaggtggagctaaagaagatggcaaaggattatccatttgggataaatatgcacaccaagcgggtaatacctttaaaggaaccaacggggatgttgcagttgatcactatcatcgttataaagaagacgttgaattaatggctaagcagggattaaaagcatatcgtttttctgtttcttggagtagaattttgccagctggtgaaggtaaagttaaccaagcgggaataaacttttatcgtgatttaattaatgagttacgtaaaaataagatagaaccaattcttacaatctaccattgggatttaccgttagcactccaagaaaaatacggtggatgggaatctagaaagacaattgaagcatttgttaattatgcaaaaattctcttttcagaatttggagagaaagttaagtattggataactataaatgaacaaaatgtattcacgtcaatgggctatcgatggggaacacacccaccgaagaaacagaatatcaagacaatgtttcaagcaaatcactatattaatttagcgaatgcactagcaattactgaatttcataagatggttccagctggaaaaattggaccaagttttggttatggcccagtttaccccaaaactaatagtcccgaagatgtcttagccgccttaaatgctgatgattttaataataactggtggttagatgtttattgtcgtggaaagtatccattctttataagaaaacaactagaaaatttgaatttaatgcttgagatcactaaaaaagataaggctattttagagaatgatgcggcacatcctgactttttaggtataaattattatcatggaggaacggttcaagagaatcgattacaaaaaccggcaactaatgataaagaaaaacaatttaataaagtagacccatatttgatgcaacctaaaggggatcaagctaaaaatcctgaagttccaatgtttaatggtgtagaaaatgattatgttaataaaacaaattggggatgggaaattgatccaaccggtttgcggattgctctaagacaagtatatgaaaaatatcaactaccgatcatgatcaccgaaaatggactcggtgcaaaagatattgttgagaatggaaaaattaatgaccaataccgaattgattacttagcagatcatgttttggcaatgaaagaagcaattagtgacggagttgatttaattgggtattgtgcctggtcatttactgacttacttagttggttaaatggatattcaaagcgttatggctttgtctacattgaccaaaatgatgagcaaaaaggtactttaaagagaataccgaaaaagagttatacctggtacaagagtattatagcgactaatggaaatgatcttagcttgttgaagcatggagaacaaaaatgaagtatttgaatggaaattggctagttaaagatggtttttcaattgattatgcgcaaagcatatatgatagcaggattgaaaataatcaattaaccctttgggtcccatttaaagaaataacagacccaggaatgactttagacgatggaatgataactttagaagtttcatctccaagagaaaatattattaacaccaaaattattaattatcgtgggcatgtagatcatggtcctgacttcaaattgaactatgataaaaatatttcctcggaaataatagaaacagacgacaaatttgttattagatctggcaaaacaagattagaaatatctaaagggagtcaaattctttttaaatattattatgaaaatgaattgaaaactgaaatcgctcctcgctcaatagctagaatttttgatccggataaaaaggttcatatgtcgaattcttttgtgcttgaaccaggtgaaaaaatttatggtttaggcgagcgtttctctaattttattaaaaatggtcaagaaatagaaatgtggaatgcggatggtgggactgagactatgcagtcgtataagaatattcccctctatctttctaatcgacagtacggagtttttgttgactcaagtgaaaaggtctcttatgaaattgcctctcagcaagtagaccgagttgaattttctgttcctgaccaaattttgtcttactattttattggtggaaacaataataaagaggtattagatcactatactgctttaactggtcgcccacctttgcttccagcttggagctatggactatggttaacaacttcatttacaactaagtatgatgaaaaaacagttatgagttttattgatgggatgattgaaagaaaaataccactatctgtttttcattttgattgttgctggatgaaaccaacagaatggtgcaactttgaatgggatcctgatgttttcccagatccagcggacttacttaaaaagattcatgcacgtggtattaaagtgtgtgtttggattaatccatatatcgctcaaaaatcccatttatttaaagaagggatggaaaatggctactttattaagcggacaaatggagatatttggcaatgggacaagtggcaagcaggaatgacgattgtcgactttacaaatccaaaagcagttaaatggtatcaaggatacttaaagaaactacttagacaaggtgtggatgtcttcaaaactgattttggagaacgaattccaagtagtgatgtgaagttttttgatggctctgatcctaagaaaatgcacaattattacacgcttctgtataacaaagtcgtaactgaagcgattgccgaaataaagggtaaaaaagaggcactagtttttgcaagatcagctactgttggaagccaatgttatccagttcactggggtggagactcgtcctccaattatccttcgatggctgaaacgttacggagtggcttatcgtttggaatgagtgggtttggatattggtctcatgatatttcaggctttgaagctagcgctacaccagatctgtatcgtcgctggacacaatttggattattaagttcacattcacgctatcatggatcaaccacttataaagttccttggctatacggagaaagatcagttgaaaatacaaggaaatttacgcacctaaaattgcagctattgccatatctaatggctatgtctaatgaagctcattatcatggtgttccaattttaagatcgatggttttagaatttcctgaggatccgggctgtgaggacttagatatgcagtatatgttaggtgataatttattagttgctccgatttttaatgagcaaggaatcactactttctatgttcctgagtctgatggtaaatggattaatattttaaataataagagttatgagggtggaaaatggtatagggaaaaatttgatgattttactttgccacttttagctcgcccaaactcaattattgttactggtaagcataatgataagacgatgtacgattttacagatgagccaattgttaatatttatgaattaaaagatggaaaaatttctaccatacttactgatagttacggtgaaaaaattggaactattagtgtagaaaagaaaaacggcaagattattgccgatagcgatgtcgtaaaagaatttactttgagaatttatgatgcagataaaaaagcaaaagaactaaatacaaaaaatggacgaattgaagtttaaaaaagcgatatgatcattttaaaggagagctacgttttctgaattacagaatagaaagaaacaaggaataaaatcatgaagcgtgccttagatattaaccaatttttacatggcggtgattataatcccgaacaatggtgggatgagcccgatgtaattaatcaagattttgctctctttaagcaggctaaaattaataccgtgactgttgggattttttcgtgggccaaattagaaccgcaagaaggaaattatgatttttcttggttagatgagatttttgatcgagtagaggaaatgaatggtcatgtaattttagctacgccaagtggagcacgaccagcctggcttgctcaaaagtatccagaagttcttagaacagataaccggggaaataaacgtggctttggtggacgacataatcattgtttaacttcacctatttatcgaaaaaaagtttatgagattaacacaaaactggcagaacattttggtcaaaggaaaagtttggtgctttggcatatttctaatgaatattcaggtgaatgctactgcgatttatgtaaagatgcttttagaaaatggctgaaaaataagtatggcgatctagctactttaaatcatgcctggtggaacactttttggagtcatacttataatgactggagtcaagttaatccgcctagtcctttaagtgaaatgggtaataaagggatgaacttagactggaagagatttattactgaccagacaatttcatttattgataatgaaacagcacccttaaaaaagatcactcctaatattcctgtaactacgaatatgatggctggaaatccgttgatggatccatttgctggttttgattatcaaaaggtagcgcgtcattcggattttatctcttgggattcttatcctgcttggagtaatgacagtcaaagtactgaagaacttggacgaaatattggattaattcatgatttctttagaagtttgaagcatcagaactttttagtaatggaaaataccccatcacgtgttaattggcataactttgatcgtgcaaaaagacctggaatgcatgaattggctagtctgcaagatgttgcgcatggtagccaaggagtattgtatttccaacttagagcttcgcgaggatcatcagaaatgtttcatggggctgtaattgagcatcgtcatcctgaaaaaacgcgtgcatttaaagacgtaactaaggttggtaaagacttggaaaaaattagcccaattgtagcaacaaattatgcaaaagcaaaagtcgcaattgtctttagctacgatagttactgggcactgcaagatgcggaaagttatagtgagaataaaaaggtctggcaaacaattcaaaagcattatcgatatttttatgaccatgatattccagttgattttgttagtcctgaagatgagttttcacaatatgacttattgattgatccaatgcactttttaatgagtaagtcctatttagaaaaaatagataattatgttaagaatggtggtaagatagtcggcacttatattagcggagttgttgatgaaaatgatcttgcctatatgaatgaatggccaaaagaactacaagaaatttacggacttgagcctcttgaaactgatgttttatatcctaggcaatcgaatttaattaattttgaaggaaaagaatatcctgtgcacgattattgtgaaacgttaattaactgcacgggaaaagttttggctacatacagtacagatttttatcaagatacacctgctattgttgagcattcctacggagctggcaaaagctattaccttgcttgtcgtactgattattctttcttagaaaagttttatgaaaaaatagctagtgaattagttcctgaaattccaattacaaaatttaatgatagagtttcaattcaaatacgtgaaaataagtcagaaaaatattggtttgttcagaatttttctgataaagaagaaaaaattgaattgagttgtgaattagttaatttgctagataatacaaaggaaacaggcgaagttgttttagaaccatttgaaagtaaagtttataaaaataattagttctaatttgtttgaaacgttttaaaatattaaatcaaatattggaatgacaagaatatcctaaaaagtataaaaattaatttataaataattttattttctaaaatactgatatatcaacatttctgaatgctgattgtcagtattttttatttccttttatagaaagcgcttgcaaattttgaaaatcatagtatatttaaattgtaacttaaaacgtttcaagttttaaaaagccgttagttaaaagggctttagtgtacatgtattagtttatttaaaacgtttagatttgtagggggatttaaaatgccaattactttagcaagaattgatcaaagacttattcatgggattactgttaaccaatggaataaagtattgcaccctaagagattcatggttattgatgatgaagtcagtcaaaatgaaatggtaaaagccagcatgagaatgagtaaaccaaccggtactgggatgtcaattataaatgaagaaaaagctataactaactttaaaaacggaaaatatgattcgcattcagtttttctaatagttaaagagcctcattatattttggacttaattaatgctggagttgatattccaaaagtaaacgttggagctttattcgaagaaggagatagaaagccatatactaagcgagttgctctagatgaaaaagaattatctgatttaaaggcaatttctgataagggtattccagtattttttgaatatacaccagacgatgaaaatgaagtttcacttgaagatgtccgaaagagtaaaggggagaattaattatgcctattgtcttacaaaatattctaatcatcttattagctgcctatatggcttgggataatggtactggaaatcaaattacaggtaattggccagttatcattggtatgctggtcggtttgattatgggtaatttaaatgttggtttagttattggtggtaccttacaactgatgtctttaggggtagctgcgattggtggatcctcaattccagaatatggagttgccacaattgtaggtgtttttatagcaattagaacaggagcttcaacaggtactgcaattgctgttggattacctgtagggatgttaactttacaactcgatgttgttattaagattattaataacttctttgcacattggtcacaaagactacttcatgaaaagaagtttaataaaatggatggagtattttatctaactatttttgtttggatgcttaagtacattattccaattggattagttgtaatgtttggtacaccaatcgttaagttgattcttcatgttattccaacatgggttacaaacggattgactattgctggaggaatgttaccggttgttggtattggaatgttattgagatttatgcctgtcaaaaaatatttggcttacttattagctgggtttgtattagcaggatatttaaaggttccaattttaggaattgcaattttaggtttagctgcaacttatgaaatttatcgtattaattctgctaagaaggatacgcaagaagtccaatcagcaggtgcagtagaagatgaaggagacgacttcgatgagtaaagaaatgaatcaacctgaaaatggtaaaaaattaactgtccgtgaacgaaaaaatatgtttagacgttggattttcaatgctggtttaggctacaatttcgaaactcagcaggctccagctgtagcattttctatgagaaaagctttaagaaaaatttatccaaatgacgatgaatatattgaagctatggataaccactataaatacttcaatgctaaccctttgatggctaatattattctcggtgctactcttgcaatggaggaaaaagacgggattaaagctaaagatgcagttcaatcattgaaaacatctttgatgggaccattttctggagtaggtgactcagtattttggattttaattccaacaattatgggatcaatttctggttatatggctctacaaggaaatgcagttggtgcaattttatggatgctattacaactttcattttactggctaaagatgtggttctttaagacaggatatgattcaggtacaaaattaataacttcattaggagaaaaaataaatatttttactgatgcaatttcagtaatgggattaatggttgttggttcattaattcctacagttgttaaagtatacactccattaaaatttagaactggaaaagttatgctttccattcaaagcggagttttagataagattatgccagcattgcttcctgttgctgttactggtctagtttattggctattgggaaagaaaaagtggactccaactaagattatcttattaattattgttatttgtttggttggtgcagctttcggtgtattaggcgttgcaaagtagaataggttggaagaaaaatggataatattaaacgtcatattgttattgcgtcacattcaacattagctcaaggaatggcaaatgctttgaaatttttcgagggagataatttaaaattaactgttttatcagcatatgttgacaataagcccatcgaaggacaaattgaagagatttttgatcaatttgataaagaagatgaggttattgtattaactgatttgttgggtggttcagttaatcaaaaatttttcccgtatattaaccgaccgcatactcatttgataactggaatgaatttatcattagcgatggcgattacaatggaaccagttgatggctatttaatgcctgaaaagatccaatctattgtctcagacgctcaaagccaagttaaatatgtaaatgaattagcaaatagtgcagatgaggacgacgaagatgaatgattggaaaaagaaagctgtagtgtatgaggcatatgtacaaagttttaaagattcaaatggagatggaattggagatattcagggactaatagaaaagctagactatataaaaaatttaggtgccaatgttatctggttaactccaatttttaaatctcctttagtagacaatggttatgatattgcagattatcaggccattaatccaatttatgggacaatggatgattttaagaaattattgagtaaggctcatgaaaaagggttgagaattgtcctggatttggttgttaatcatacttctgaccaacataaatggtttaaagaatcccaaaaaaacaaagaaaataagtattctgattattatatttggcgtgatccaaaagaagatggaagtgcacctactaatttaggctcagcttttggtggttcagcttggacctatgttccagaaagaaatcaatattatttacacctttttgcaaaacaacagccagatttgaactgggataatccagaagtaagaaatgatatttataaaataatgatgttttggttagacatgggagttgatggctttagaatggattccattagctttatatccaaaccaagtaaatttgaagatgcgcctttagaagataataaagagtatggcgcttattactatggatcagctaacggtccacatattcatcaatatttacaagagatgaacagagaagtactaagtaaatatgatgtaattgctattggagaaacgccacatacaagtgctaaagaagcaagattatttgttgaacctgaacgacatgaattagatatggtatttcaatttgaacatatgcatgttgattatggaaaatatggaagatactctgatgtaacttttaagatgagtgatctgcgcaattctatgtcgagttggcaaaatagtctttcttggaattcaaattatcttggaaatcatgatcaacccagaattgtctctagatttggaaatgataataagtatcgaaaagaatcagcaaaaatgttggctatagtatctttattacaaaagggtactccatttatttttcaaggtgaagaaattggaatgaccaatttacatattaagaaaatagatgagttaaaggaccttgaagcacataatatatataattttttaagatcaaaaggtattagtgaagatgacgcattgaatatggtcaacaggaaaactagagataatgcccgtacaccaatgcaatgggatgaatcggaacaaggtggtttttcaagtgaaacgccatggatggaagttaatccaaattataaagaaattaatgtgaagaaagatttgaaagatccagactcgatatatcatttttatcaaaagattttgaaattaagaaataataatcaagtattgttagatggaaagtatgagctagtttcttctgatgattctgcagtttttgcctatactcgaagtacggggaaagaaaaattggcagttatttgttcttttgtcccatataaggttaaatataatttgcctactgattttgtaaatagaaatgaattgcttttatctagctatggtgacaataaagcaaaagcctcaaatgttatgtatttaaggccttatgaaggagttgtgattagacgtgagtagcatgaaggatgtggcgcgtgaagctaacgtttctgtggcaacagtttcaaatttcttaaacggaaaaaaagtacgtccaaaagctgcaaaagaaattgattctgcaataaaaaaactaaattatgtaagaaataatgctgcacgttttttgaaaacgcaacaatcagcttttgtagtttttgttgttccaagtgtatggtctccattcttttctgaattaactttttgggttcaaaaatacttagatgaacttggatataaaatggttctatgtgtatcagagaatgattatcaaaaagaaaaaagttacgtcacgatggctgaagagcagcgtgtagctggaattctttcaatctcttattccgatttaactagtcatgtacattctgacatcccccttgtttctattgaaaaagaaagcacaggtcaattttcactagtatcttcagataattatgaaggtgggaagatagctgctcgagaactaagcaaaagaaaactgagtaatttgatatttattggttcagctaaccataattctgttgaaatgaatgcaagaaaagcgggatttatagattattgtaataatcatggaattaaattcgaattaactgaaattgattcccggaaagatgataaacatgtaatcgaacatttaatccaaaagataaaaaacgagagcacaaattatggcatttttgctcatactgatgaattggctcttgtattaactgaagaatttcaaaaagcagaaattgcagtccctgaacatgttcagataattggttttgatggttggcaacttactgctgatacaccactgaccatttcttcaattagacaaaatattgaagcaattgctaaaaatgctgttgaacagttacataaagagatgcaaaatccagatcagaaggagatttcacgtttaatgattcctgttacttttcgagcaggagagacaaccctaaattaataaaaataattctctaaatatcaaacagtcatttgttagaattatgagtagaattcatgattcttttctacgtaaagtcaagtaccatgcagtatttgacttttattttttatgcttattttctttgcattgctctataccaatttgactatctattataaataggtataaaataaacctttctgtgtatataaaacacataatacagaaaggatagtttttaatgaataattcaacaacagagaagactttctttggacaacctcgtggcttgtccaccttgttcttcactgaaatgtgggagagatttagttactatggtatgcgtgctattttgctcttctacatgtattatgctgtagaacgtggcggactaggaatgaatgaagccacggctgcttcaatcatgtctatctacggttcacttgtttatctttctacggtagctggtggatggctagcagacagaatttggggagcacgtagtactgtcttctttggtggtgtccttattatgattggacacattatcttagccctaccaatggcagaggtaggtttatatatttcgatcgcattcattgtggtaggtacaggtttacttaagcctaatgtttctgatatggttggtggcctatactcattagatgatcgaagacgtgatgctggtttcagtatctttgtttttggtattaacttaggatcagcgcttgctccatggttagtgccttgggcaagtgaaggttttggccttaatttatttggaaatcattttaatttccatgctggtttctctttagcagcagttggaatgttctttgggttagtacagtatgtttggggcggtagaaagtatctctctgaggatgggatgcatccaacagatccaatcgatcccgaaactcgtaataagatcttaaagagaatcggtttaggaattttagctttagcagtagtattaggtttaatggctgcttttggtcaattaaatattgataatattattactttaattactattgttgctattgccttaccaatttattactttgttttaatgcttagaagccctaaagttacaaaagaggaacgctcaaaagtttgggcttacattccattatttattgcagcttctattttctggggaattgaagaatctggttctgtagttttagctctatttgctgcccaaagaacagtacttcacatcggaggatggcactttaccgctgctaacttccaaactttgaacccagtatttatcatgattttgactccgttctttgtatggttatgggataactggaagaaacaaccaagtgctgctggtaaatttgctgctggtttggtctttgctggtctttcatatatgtggatggcccttccaggaatgctttatggaacaaacggacgagttagtccattttggttagttggctcttggtttattgttgaaattgccgaaatgcttatttctccaattggcttatctgtaactacacgtttagcaccaaaagctttccgttcacagatgatgagtctttggttcttagcagatgccactggtcaagctatcaactcccaaattgttaaatactactcaagtaaaactgaagtggcatactttttagcagttggaattgttagtgtattgtttggtgtagtgatgtttttctttactaagaaaattcataacttaatggcagatgctgagtaaaacaaacataatttaatatttaataaggaaagatttgatgggtaattcgaatttttccttatttttttataaaagcattagctcacacttttgaaaatgcgttttagtaaaatttttgcgcctaaggtaatacaatgaaaaatgaataagaaaggttatttaaatgaaagtgtgatatataatgattgaaagtaatcacagtgcatgtacatcaattctaattgggaaaaatgctactacagatggcagcattatcattggacgtaatgaagatgataagccaaactgtgctaagcatttagcttttcatgaagaaaaggatattcctaataatcactttaagtctaacttgaataagtttgaaatggatttaccaactcatagatatgcttattcttcaactccaaactggagtgacaagaagggtgtttatgaggaatccggaattaaccaatttggtgtagcaatgagtgctactgaaactacttatgctaatgaccaagttcaatcttttgatccatttaagaagaccggtatcattgaagaagcaatggtaacttgtattttgccttatgtaaagacagcacgtgaagctattgctcgctttgctaagattattaaagatcatactgcaggtgaatcagatggtattttatttgccgatcctaaagaagcttggtacttcgaaattggtactgctcactactgggtagcacaacgtattccagatgattgctatgctgtagctgctaatgaattagcaattcaagaaattgattttaatgactctgataacttcattactgctcctggtttacaaaaatttgttgaagagcataatttatggccaaataataagccatttaattggcgtcgtatttttggtacacataatctgttagatttaacttataacactgctcgtgtttggactggtcaaagaatcttaagtccttctattaagcaagaaccaagcagctttgatattccatttattcaaaaggcagaccatccaatttcaataactgatgctcaaagagttttaagagatcactacgatggaactaaatatgatgtagcaaatcctgttaataaagatacagccgtatatcgtccaattagtgttgactttactgaggagtcacacttactacaacttaaaggtaaggattggattcactggttatcattaggcattacttgtcaaaatgtatatgttccattctatccacaaggtagcgtagtgccaagcttctatagacacggcaaagataagtatgcttcaaactcagcatattggatctacaaggaagcacaagtcttagctgatcgttcatggaaagactatggtttgcaattgtatcaagctagaaatgctacacagcaaaaattaagtcaaatgcgtattgaatatgatgccaaagttgataaagaaaaggatcctgcaaagaagttagacttaatcaacaaggcaaacaaagacttagctcatacagcagttaaggattatcaagaattaattggtaagttgattacaaagcaaataaagaaatcaccattgcactttagaagagacccagacttataatctaggattgtaaatcataaaaaaacgagtagaataagttctgaagaaataattgaatgacagagagcattcgttttggaggaatttaatatggatacactggttaagcacagacatactctaagcaaaaatcagaagtgggttattgcatctacttcgtcaggttttgcgcttgagaatatggatgtgctttttttatcgtttgcaatgagttcgatgattgctgatctccacttgtcaggtggagaggctggttttatttcaacgattactaatttaggaatgttagttggtggaattgcctttggaattttaggtgataagattggtcgagttaaaacctttagccatacagtaattatttttgcaattgcaacagctttgatggcatttaccaataatatttatcttatctatgcacttcgttttttagcaggaattggagcaggtggagaatatggtgtcggaattgctttaattgctgaaaactttcataaagaacaaattggtaaaatgacctcagtagcagcgattggtggtcaaattggagcaattttagcggctttaattgcagcttggattattccagcagcaggttggcatatgctatttttaatagggattcttccagtaattttaactatcttcattagaaaacatgtccatgaaagtgagcaatttattaaggctcaggctagtgaaagtaattccttattatcggatgtggctaaaaaaatgttttcaacaccacatcttgcttggcaaacagtgggtttaatgattatgatgacagttcaaattgctggatactttggtttaatgaactggcttcccacaattgtacaaaagcaattgaatttaaatgtttcgaattctagtctttggatgatttctacgattattggaatgagcattggtatgatgacatttggttcaatttttgactactttggtcctagaagagccttcgcaattttcttgattggttcagctttaatggtttataccttaagtttggcccaaaatatggccatgcttttgattattggagctgtagttggctttttctcaaatgggatgtttggtggctatggcgctgtaatcagtagattatatccaacagaaattcggtcgagtgccaataatattattgttaatgtcggcagagcaatcggtggattttcatcagtagtaataggtattttaatggataaatataacttaggcgtagtaatgggctttttatcagctttatacctacttagctttgttgtgatgattactttaccaggcttaaaaacgttaacaaaagaagctaaaaggaactaaatatagcttttaacgataggaaactagtaagaataaatatttttcaatcgataattgtccttatatactatagaaaagtaagtgtgagaggaaataattatgaagaagaaaaagatttatcttgctagtttttttgttgcattatttttatttgtgttagcgggatgtggtcaaaaagctcaaaatgttcctgctaaaagggttactgtatctttaaccaatactaaaacaattcccacatttttctttcatggttggggatcaagtgcgaatgcggagacccaaatggcgaatgccgcaaaaaaggctggtgtaagtaatacaattattcaagcagatgtaagtaaaaatggcactgttaaacttaaaggcacgatcccaaaaaatgcaaaaaatccaattatcaaagttaatctagaagataatcagagtggaaaaacatcatatgtaaaagatgtaataactgcaatctctaataaatatcattatgcaaagattaatttagttggtcattcaatgggaaatctacaaattgctaactacattaatgaaaactatgacaataaaaaattgcctaagattaataaagtagtttcaattgcagggcattacgatggctatcttgatgaagaagctggccaaaaggctaagatccaaaataagaaaacaggtgaaccggatatttatagtgatggctttaagcaattattacctttacggaaacactatccgagacaaattgaggtcttaaatatctatggtaataaagaggatggttcaaattctgacggatcagtttctgtagcatcggcacaaagttataaatatttaattaatggccgtgccaaatcataccgtgaagtagaaattaagggtaagaatgtacaacatagcaaattacacgaaaataaagaagttgataaacttttaattgattttttatggaaagaataataaaaagttattgacaatagtctctgtgaggtgaagtatggaattaactgctaccgaaaagttgaattttgcaattatccgaggtggaaaagcttatgcagagtgggatagacaacatggcatgccaagttatctaaccattattttgtatgaactattaatgcgccaaagattaacgcaaaaagatctggtcaacttaagtgacttaccaaagcaatctattaataaaggaattcaccgcttactagaacaagattatctagaactgacaattgatccagaagataatcgggttaagtattgccagctaactgcttcagggaaaaaatacgctaaaaggaaaatggctcctttatttgaaattgaaaagcaaattgcacaaaaaatgggcgcacaaaagatggaatagttagtagctctaaatgaagagtggagtgataccttttgggagcttttaagaaagaagggagaataatagatgcaaattttgaagccatacttcaaaaattatcgtaaggaaataattttagcgattattacaattctgatttctgcttttgcaaccttatggcagccaagattattagaaaatatccaaaaagcaattttagcggataaccagagtgttgtcttaagagatggaattggattagttgtactcggtttattagcaattattgctggtatttttaacgtatattatgctgcaaaaattgcccagggaataacctcagatttacgtgaagaaacttatgctaagattcaaagtttttcttttggaaatattgaaaaattctctagtggttcattagttgttcgtttaattaatgatatgaaccaagttatgaatatgatgatgatcttattcatgcaattactcagaatgccaattattttaattggatcatttgtattgagtattattaccattcctcaatattggtgggctcctgtattaatgctagctttaatgatgggggttggatacattgttattcaaaatatgaataaactttttgctaaattccaacactacatggataaaatttctactcgcgttaaagaaaatttacagggtgtacgtgtagtaaaatcttttaatcagggagaaaatgagattaagagatttaacgaaacttctgatgatttaaacgaattaaatattaagattggttactggatttctactattatgccagctttcatgttaattgcttatttagtaattgctttggttgtctttttagtaggacgcagtgctaatttaactccaactgatgttgcagttgtatcaccatatgtttcttatattttaactttgctctttgcaattttaattggtggttttgtgattatgaacttcactcgtgggatggtttctctaagaagaattaaagaagttcttgatactgaaccagatgttcagtttgatcctaatgcaccaactgcaccggaaaagggcagtatcgaatttgacgatgtttcttttacttatcctgatggcgataagccaactttaaagaatatttcatttaaggtgaaaccaggtgaaatggttggtattgttggagcaacaggatctggtaaaagtacgctggctcaacttattccgcgtctttatgatacgactaaaggaacaataaaaattggtggcaaagacttaaagacaattggtgaaaaatcacttcgtaatactgtttcaatggttttacaaaaagcaattttattctctggaacaattgcctctaacttgcgtcaaggaaaagaagatgcgaccgattatgaattaaaacgtgcttcagaaattgcccaagcacaggaatttgtcggtcaatacccggatcgatttgaccatgaagtagaagaaagatcagctaacttctctggtggtcaaaagcaacgtttatcaattgctcgtggtgttattggtcaaccaccgattttgattttagatgactctacttcagccttagatgctaagtctgaaaaattagttcaagaagctttagagcatgatttaaaagatacaacaacagtaattattgctgaaaagatagtatcagtgatgaatgcagacaagattttagttttagatgatggaaaattggttgctgaaggaactcatgaagaattactgaagacttccccaatttatcaagatatttatcgcacacaaaaagctaaagaaaagagaggtgaaattgatgagtaatattaaaaaagcattaaaatactttgccaagtatttaaagaattattggaaaggcgttacaattgttatcgtcttatctttgatttcgactttgagtcaagtgcttggtcctcttttcctaggaaatgctgttcaagaattgactaaggcggttaataaagtagctagccgtactcatgatttaagtagcttttatcaggctttaggatcaatggtgggtgtatatgcagcaggaattatcgcctcctttattgcatggatggtaatgtcaaaattcactgcaaatgctactaacgatatgagagaaaacttatttgctaagtttcaaagaatgttaattcgctactttgatactcatcaagatggaaaattattatctctatttaattcagacttagataatatttttaatgccttgaataatgcaatttttgaaattatttctcaaggtgcattattaatcggaactatcattatgatgtttatcgtaaatccaactatggctctgtttacggtagcaacaacgccattcattttgattattagtgtagttattatgaagaaggcgagagtttatttagataagcaacaagataaaattagtgatcttaatggttatgtaaatgaacagatcaatggtgaaaaagtaattattactaacggcttgcaagaagaatctgttcaaaactttaaaaaatacaataacgatgttcgtagcgctatgttcaaaggtcaattttattctgggatgctcttccccttactacaaggaatttctttactaaatttagctattgtaattgggggaggggcatggctgattgttagtggtcaagtcagtcaagcaattggtttaggcttaattgttgcctttgttgaatattcacaaacatatttccaaccactaacccaactcacttcaatttattcaatgacacaacttgctttaactggtgctagaagattggcaactgttgaagagcaagatgaggaaaatacggtgcccgatggaaaagttcttaaaggaatcaaaaagggcgttaaattagaaaacgttcgttttggctataacgctgataaagagatcttgcacggcgtttcaattgatgtcgataaaggcaagtcagttgctgtagttggaccaacaggttcaggaaaaactacgattatgaacctaattaatcgtttctatgatgtaaatagtggtaaagtaacttttgacggtgttgatgttcgtgatattacacttgaatctttaagaaataatgttggtattgttttacaggattctgttctatttactggaacagttgaagataatattaaatatggtaagccagatgcgagtcgagatgaagtaattgcggccgcaaaagaagctaatattcatgacttcattacgaccctccctgacggatatgatactcaagtttctgaagaaaattctgtcttttctactggtcaaaagcaattaatttcaattgctcgaacaatcttaacgaacccagaatttttgattttggatgaggctacttctaatgtagacaccgttactgaggccaagatccaaaaagctatggatgcagttatcgcgggcaaaaccagttttgttattgctcaccgtttgaagactatcttaaattcagataaaatagtagtgttgaaagatggaaatgtcattgaagaaggaaatcacgatgaattaattaagaagcgtggtttttactatggcttgtatacaaatcaaatggcatttgaataattttgaataataaattagagggacgctttccctctaattttggttagggggaaagtttaaaaagtgaagagaaagctacgattcttttctttatttattgtcttatttagcgtttttttactttcggcatgtcaaaaaaatactcgtaacgtttatcaagaagtgaaaaaaagtaatgaaattacttggggcgttaaggccgatacccgtttatttggtttgatgagcattaaaaccgggaaaattgagggttttgaagttgatttagcaaatgctttaactaaagaaatactaggaaaaaatgccaaggcaaactttgtacaaacaactgcaaaaacaaaaattccacttttgaaaaatggaaatatcgatgcagttttagcggcaatgacgattacgccagaacgcaaaaagcaaattgattttagcgatccatatttttatgctggacaatcacttcttgtaaaagatgattcaacaatcaagagcattaaagatatgaatggtaaaactgcattagctgtaaaaggtacaacagcagttgccaatgttaaaaaatttgcacctaaggctaaagtattagaatttgatgattatggtcaagcatttactgcgcttaaagccggtcaaggtcaagccatgactactgataatggtttgcttgccggaattgcaacagaaaacaagggctataaacttgtagggggcacctatactaaggagccctatggaattgctgtcaataaaggacagatccaaatgaaaaatgcaattaatcgtgcactcgtaaaattaaaaaaagatgggacgtatgatgccttggtaaagaagtggtttagcggtattccgggctttaatattaaagaggctgaaggtgaaaaataaaatttttacttgccttttttgaaaaaatattattaaatgtaatcaacatttaaatttaaaaagcgataaaaagaaaagtaggtaatctatttcttttagtgagttaacggtagtggaaaagttagcagaccctggattattgaaagacacttttataatgctgctggccgaaatcttttaagagagtaagtttagccgtaagcggtacgttatctagccgctggagcatggttgtgctctagtcaagttggtctttaattagacaatttaggtggtaccgcggaaaaaagcctttcgtcctgagtaaattaggagcgaagggctttttttctttactccaatcaggaaataaaggggtatgcgacagatataactacagaagttaattttaagaagttttagagtagaatggaaaagtgagtaaaaaagagaggggaagcacaatggctgcaattattgattttaagcatgtaaataagtactatggtaagttccatgctttaaaggatattaatttgagtattgaagagggtcaagttgtttcaattatcggcccgtctggttctggtaagagtactttgattcgtacaatgaatggattagagcgaattaattctggtactttgatggttactggctatgatttggcagataagcatacggatttaaataaaattcgtaagaatgtgggaatggttttccaacattttaacttatacgacaaccacactgtgcttgaaaatataactttagctcctaagattgttttgcatagaccagataaggaaaataatgatattgccatggatcttctaaaaaaagttggtcttgaagaaaaggcaaatatgtatccaagacaattgtctggtggacaaaagcaacgtgttgcaattgctcgttcattagctatgagaccaaaggcaattttgtttgatgaaccaactagtgctcttgatccagaaatgattcaagatgtgttagatgttatgaaatacgtagcagatcaaggaattacaatggttgttgtaactcacgaaatgggatttgctcgtgaagttggggacagattaattttctttgatcaaggtagaattttagaggatgaaaaaccagaagaattctttgcacatcctaagactgaacgtgcacgtcaatttttaagtaaggttattactgaaaagctaggtggctaaaatgaaaaaatcaactaagatttttattttgcctctggtactagctttattagttactttgaccggctgtgccaagaagcagaaatcaagtaacgtttatgatcaggttaaagagagtaagacaattacttggggagttaaggctgatactcgtttatttggtttaatgagtattaaaactggaaagatcgaaggttttgaagttgatttagcaaaagccttaactaagcaaatgttgggtaaagatgcaaaagctgaatttgtacaaacaactcccaagacaagaataccgctactaaaaaatgggaatattgatgcaattttagcaacgatgactattacgcctgatcgaaaaaaacaagtaacttttagtgaaccatattttactgctggtcaatcactgcttgtaaaagatgattcttcaatcaaaaacgttagggacttaaacggcaagaccgccttagctgttaaaggaacaacagcagttgataatgttaaaaaatttgcgcctaaagcaacagttttagaatatgatgattatggtcaagcatttactgcactaaaagcaggtcaaggtcaagctatgactactgataacggattacttgccggaatcgcgagtgaaaataaaggttataaattagtagggggaacctacacaagtgaaccttacgggattgcagtagaaaaaggtcaaactgattttgcggatcatattaataaggcactaaatgaattaaagaaaaatggaacgtatcatcgtttattagttaaatggtttgacggtattccaggatttaatattaaggaggttgaaaattcgtgataggaattttaacaaatcattggtctgaattcttatcaggcttttggaacacaattttatgtagtgtaattgccctattctttagtttgatccttggagtaggctttgctttgctagaagttgcaccaaataagtttggtagagcagtagcacatgtctacattgaaattttccgtaacattcctttgttagttattacaatgattttttatctggttgtacctcaaatttggttcaaggtatctggatttgcagcaggtacaattggattaacattatatacttcagcatttattgcagaaacagttagagcgggaattaactcagttggtgatggccaaatggaaggtgcccgctcaaatgggatgacttatacgcaagctatgcggtatgttatcttgccacaagctttaaagattgtcattccgccattaggtaaccagttcattaacttaattaagaactcatctgttttagcctttgtagcaggttttgatttgatgtatcaagcagacgtaattgcattctcatcatttgaaacaatcaatacttatgttgttgtagggttattttacttagtactaaccctcccattaagttactacatgcgtcacttagaaaagaaattagcctagaaaggagaaaaagatggaaaactttattcatgcatattcttggattaacattcgctttctcttacaaggtttgtgggtgaccatatatgtatctttgatctcaattgctttaagctttgtattaggactagtattgggttttatccgttacgtgaaaattaaatatctttcagcaattgtgggatttgtaattgatattattagaaacctgcccctattgttaattatcttctttacgtattttggattaccagaattagggattattaccaatccaacggttgcttctattattgctttggtagtatttgaaggggcaatgctagctgagattgtgagaagtggtattgctgctgttgatccgggccaaatggaaggtgctcgctcaaacgggatgacatatatgcaggcaatgtatcatgtaattattccgcaagccctcaataagatgattccatcccttttatcacaatttgtttcattagttaaggatacgtctttagcaacaattattgttttgccggaattattattccatgcacaaattatttatagtcaaaatactacttacttaattccaatgtatgtaattattgcgattatgtacttcattgtttgtttctcactttcaatggttgctaagcatttgcaaagtaaatattaaaaaataaaccacatgaaaaaattcatgtggtttttattatgccttttagtagagctaattaactgtatatccaaattggtaaaaaaatgaactggtttggtattttttgtatttttattttaaagaaaggaataaaatacaggtataaatatataagaaaaaataaaatgtgaggaaattaattatgaaaaattggggtttaacagccatgtacattgtcgtaatgttactaggcttctttgaattgtatcgtaccttcagattttataagtgggataaaaaggcaaaacaacttgcaactgcaccttatgtaatatattttggaaccttcattagtgcagtattgattatcgtaccagtcatgttcttgttaggggatacgaatccttatattccaaactttttatatgttattctaggaattattttaattatcgtatcacttttaatgtactggcgtggacatcaaatggctaaaaagttgggcaaggatgatagtaatttagccgtttggcaaatttatttaattagtacggtaattctatttagtggatttgtaaatttctttaagtaaattatctagtaaaaagagcaactacacatgaaaatatatgtgaagttgctctttatttactatattttaattgctaaagcttcatatggctttaactcaagtgttgaaggaagagtaacaatctcttcatcataattttgaattaaaatttcaccgtcacgatctatatattccgtaggaatttcaacctttgtttctttgccatagaagttagcaaagactaataatttttcgtcagagttatctaagtagcgttcatatgccataacctggggatgatccatcaaaagaggcttaatgtgaccagctgaaattaattcttcgctttttctaagtttaattaatttttggtagaaattaaatatttctccttcacgtaattccttttcaccattcaccttgtcttggtcagttggcatcagccaaggcttactttcactaaaaccagcatatttagaattatcccaatgcattgggactcttgaattatcacgagcttttgattgaacgatttcaaaagcttcttttttattcatccctttagcaatgagggcatcatatgcatttagtgcttcaatatcaacataatctttcatcgaagtatagtgtggatccatcataccgatttcttcacccatgtagatatagggtgttccacgcagtaggtgaagagcgagagctaacatttcagcagatttgtcatgatatttaccggtatcgccaaaccgatttaaagcccaaggctggtcatgattgttccaaaatagagcttgccaaccgccaccttggtcaattttgctgttccaagtaagcataatgtcttttaattttttgaagtcaaaagacatctttgaccacttttctccatttttgtagtcaactttgagatggtggaaagtaaataccattgagagttcatgatcttgtgggcgagtataagcaattgaattttcaattgtagtagaggacatttctccaacagtgacagactctggatcttgaccaaaggacttagcgtttaattcttttagatattgctgcactactggagtatcagtatagagtgatttttcttggactggatcagttgaatcaactaggacagtatcttttcccgttacattaattacgtcaaagcggaaaccgtgaacacccttactgcgccaaaagtttattacatcaattaaggcagcgcgaacctctggattgtgccagtcaagatctgcttgagttggatcataaagatggaggtagtaataatctgtgtcaccaaattttgaccaggcagggccaccaaatttagattgccaattgttaggcaactttccatctttaccttttctgagatagaagaatttttgatattttttatcaccagcaagagcctttttgaaccattcatgttcagtagaacagtggtttaagaccatatcaagcatgacattaacatttatatcttttagtttagccactaattcttcaaagtcggccatagttccaaagcgaggatcaatttttttataatcagcgatatcatagccgttatcattttgcggggaaacaaaaaatggattaaaccaaataaagtctacatttagcttcttaatatagtcaattttttggataattccgcgtaaatcaccgataccgtcattatttgagtcataaaaagattttggataaatttggtaaattactttattgcctaaattattcattgatatagtacctttctaaaacttaatcttttttctacgagcaaaatcaacaaatttgaacttatcgggtctgtgataagacaaagttaattgaaatttagttgtattagctaagtaattacggcttgcaactaaaactgcaagatcattgtcgagttgaagtaagtcttgaattcttttatcaactttgcagacagaaatttcttttgttgcgtatgaaatatctaatttttgtttattttctaaatagtcatagatagaagtctcagcagcttcctgtggaagagaattaactggaggggagagtaaatagtcacaatccaatacatctgcctgcccatctattaaacgtaatcgttcaagatgaaaaccgatgctattttcttcttcaggaaaatactttataaattgcgctggtaatttatcttctttttgtagaagtaatacttttgtctcagcttttaatcctaattggttattcaattccgcaaaactagtaattccgaaaattggaaaagtataacgatctaaattcaatacaattgaaccttttcctctaattttttggatcagtcctaggtcagttaagctgttaagagcttttcgaattgtctcacgagaagcgccatataaatccattaattgatgttcacttgggagatagtcgccaggcttatattgttgatgtttgattttatcaactaagtcttgagcaattactccaactttagattgagccataaaaaaccctcctttgtctttaattatatacacttgattagacaagtaaagaaaaacatttttaattataaaatattgatttaaaagaaaagtaagctttttcataaaaatatattgacaacttgtacagacaagtataatattaaaatcaagataaatgaaagcggatactttcaaaggggagaatgaaattatggtacaagatactactaatttattagctccagcaactggagcggttattgctttagctaaaacttctgatccaatcttttctcagggaacaatgggagatgggtttggattaactccaaccattggaaaggttgtagcacctgtttcagggaaaatcagtatggttgctgacactaaacatgctgttggtatcgtaactgaagaaggactagaagtgttagttcatatgggtgtggacaccgttggcttaaagggagctccatttaccattaagattgaaaatggtcaggaagttaaggctggccaagaaattgctgaaatgaacttagatgaaattaaagccaaaggattagatacaacaattatggttttaattactaattcagcagataagctttcaggactagatgtaactgaaggtgaagcaaaagctggtgaagtagtagcaactgcatacttgaaagaagcaggagctgaggatacttcaagcaaaaagttatcttatccagaattagctacctttattattaaaaatgttggaggtaaggataatgttaataatgtgattcactgtattacacgtttgcgtttttacttaaaggatgaaagtaaagcaaatgatgaagctttgaaaaatcagcgtggaattttagatgtaatgcatgcttcgggtcaatatcaagtggtaatcggtaatgaggttactaatgtttttgataaagtagttaaacaattaggacctttagatagtgaagcagcgccagctccagaagatgacggtaaaaatccagtttcaagagctttcggtaatttaatcggttttattactggctcaatgagtccgattattggagtaattgctgcagctggtattattaagggtatcttagcccttctaactcttcctcaattaggaagtttgcttagtgtaaagagtacagcttatattacaacgagtgcaatcgccgattctgcattcttcttcctaccaattttagtaggatattgtgcagctaaaagattgaactctgatccgatcattgccgcagttattggtggagtgcttgtttatccgcaattagttgattggggtaaagctttcaagaccatgtttgaaattggcggaattaagtttgagttcttgaactatacttactcaattttcccaatgattttagctgcatggcttgctaaaaaatgtgaagactggcttaaaaagtggctaccatcatacttacaaatgatttttattccattaattactgttttagttgtatcagctttaactttgatggtaaccggtccaattattcaaggtgttgctaacggtattgctgtcttcattaactggttagttcatgcatctggctgggttggcggattcattattggtggtttctaccaagtattggttatctttggtcttcactggggtgttgtgccacttgttgctcaacaaattgctggaactggtgaaagtgcattaaacgcaattatttgttcatcaatgattgcccaaggtgctgcagtattagctgttgctattaagtctaagaaagaagacttaaaggaattaggttttgcttcaacaatttctgcaatgtgcggtgtaacagaaccagccgtttatggtattagtttaagatataagaaagtatttatttctggatgtatcggttctgcctttggtggattagttactggcttaatgcacggaacaatgtatggctttactggtggtttgattggattctcatcattcttcaatccaaaacatccaactgatttatctagtttctacacattcttaattgctagtgctgtaactattgtagtttcatttattgtaacttgggtatggggctacaatgacaagatggtacaaggtgctaaggtagcaaagaagaagagaccaggtagtaagtaatataatagaaaaaattatggccattatttgatcttagaacgggcaattagtagatttgataaccaaattaagttgataaaattgataaaacagcgttgataattcagcgctgattttttgaattcaatagttgaaaatattaaatcttattaatataattaataataatttaattgtgtcgtagattgggggaaaggctatgatctttgaaaagcttttttctaaagaaaataaaaaagatgagattgttagggtaaaaataagtgacgaagaattcaacgaattgaaaataaaattaagtagcggggatgtaacagttgaacaaggagaacgttttgcagttaactttatcggtaaacggcactacttacctattgttcaattggaaaatggaagactacagcttaagcaaagaattaatttaattgacaatgatgaagctcatcttaaagtcgttgtaccagcagatgtaactttggatcgtcttgatgttcaaactaatagtggtgatattgaaatcgttgataccaaagtggaaaaagcatatcttaaatcgactgagggaagagttagggtaagacgtgttgcaattgctgaatctcttctagaatcgacagatggtaatgtaaccgtgagaaacagcgatttagctgatgggaagcttgctacatatgatggagaaattaaagtctcaggatctaccttatctcaaatttcattgaatgttaccgatggagacatgaatttaactgacgtaactattgatggtggaagtgcaaacttaaaggctggtaatttcaccttagatcatgctgtctttaagagcgattatgagattaataatattgaagggaataatactgtatggagtgcaaatttaaagtacgcccgtgtcaggacagctaatggactaaataatatttcatttgatccgcaaccatctggagtgatcttaacaatgacaacagtagatggagataatgtggtggaataggagaagaatggtgaaaagagagaaatctaagcagaaaaatttaggaatttatagtagcttgaaatcagttattattaatacagtctcattctttgtaatgagttctatagtagtgggaatttctaattggagtgaagctcaaagcttaatactgaaaacgtcagaatatcttggattaataggtggaagtctgattggtggaattataatgagtttcttttttggtgaaaaataaccccgtggaaaaccacgaggttatttttatttgactgtacttaaaactgaacgaatcttcgtagtaagcatatcgatagcaacatcattttctccaccttctggaacaatgatatcagcataacgcttagttggttcaatgaattgattatacatgggcttaaccgttgctaagtattgattaattactgattctacagaacgtccacgttcttgtgtatcacgctctaatcttctgataaaacgaatatcatcatcagtatctacaaagactttaatactcattaaatcacgtaaattttcttcgcctaaaactaggataccttctaagataataatatcagccggttcagtgtgaattgtcttttcacttcttgtatgagcggtaaagtcataaactggcatttcaactgccttatagtccattaattgacgtaattgttcaacaagaaggggcatgtcaaaggcatcaggatggtcgtagttgatttttttacggtctgccattgataagttgtcgttgttcttgtagtaagaatcttgcgtcataattaagatatggtcgtcttgttgtaattggtcataaatttcatgagcgatggttgttttaccactaccagaaccaccagcaattccaatgataatagggcgtttactttgcacaataaaatctccttttttaaactattacaataataccttaaaattatgcgctatgatagctttctgagcaataatcttgacaaatatgttttttatagtgaaatattttggaactagttaaaaataaatatcttgttcactattaatatttataaaattaattctctttcaaaaaaatatatatttactagtagtacgttatagaaaaagaatactaaatcagtaatcaaattgaccaatttggtattttttgattttttagatagtaaaagatggtaatatttaagacataaaaatgttattaattgttttagaggagagaataacaatgaaagaaattaaaaaagaaaatattgttaagaaagttactttaactgaagaagaaatgagtgaagttactggtggagctagagtaaatggatttgttggtggaaaaattagtaaaaatatattttactggacgcgtaatatttggaaataaaaatgttattagtatatgttcttttaatgcttacttctggaataactgacttatggatattctttagaatttctcaagttgcagctagcaaaaaaaatattttgagtctaggtgcagtggtactattacttcccattttatgcgggggcgttgtcgaactagctacttttttagaaattttatttttcatattttattttagaaaaagtaagaaaaaggatgtggctactggatcaattttaattgtgggagttgcagattctataatagatataataactagtatcttaggagaacttttgtctattgaggatgaaatttatcttaatttattagtaccaattgtcgttataagtcttacagtttttataattgaaatattctacaagcatcttcacgcatatttaataagtgaaaatcgcaatgtatttattggacttctgtcctacttgtatgtctccactactttaacaacaattttttacagacaaactaagaagattacatcgttaagcatattttttacaatttttgtattaattcaagtagtctttgcaatagccacttacggggaactaataaatattcaaaaacatcttttgaaaaagtcccaacaagacaaactaataaaagagcaaaaacaacttcaagaatacacgcgatacttagaagagagcgaagatgaactgcgtgcttttcgccatgattatcgaaatatgtttaattcattaaaaatcagtgcacaagagggagatacgaaggaactaattcaaaaactagacgaatatactaagactaatttaaatgccaaagcatttgaaaagtatagagatgttaatcacattaaagtaaaatctttgaaaagcattattattgctaagttaacagaaatgtatggatcaaaaatcccatataatttcgaatgtagagatgatattactaaaatccctaacaatattaatgaattggatttagttagaattattggcatcagttgtgataatgcaattgaagaaagtaaagcattattgaaacagaataaaaaagctcatattgaaattatgattagttcaaatgaggatggcgaatttgaatatgaaattcagaataaaagaagagattcagaaatttcacttaaacaaatccagcaacgtggttattcaacgaagaaaagtcactctggcatgggtttagccaatattaatagtattaagaataaatatgaaaatatgacgatttcttatgagataccgaagggatactttgatttctatctcgtaattgaaccagaggagctaattaacagttaatgaaaatatagaaatttatagaagaaatagaaaaaagcttatttagaaagttaaacatggaaaataagctttaatttaatatttacttgttttgctttccttccttagataaacttatgtttgtatttaaggaggtgaagaaatgattaaaacacaagtagttaagctaaaagttaataaaacaatgcaaaagcatcttgataatttgtgcgactatcgtaggtattgctggaacaaaggattagaaacttggcaattaatgtatgaagctcatacattaaataaaaaagataatcctagccctaatgaacgcagggtccgtgatgaattagtagctaagaaagaagattggcagtatgaattatctgcacgttgtcttcaattagtggttaaagatttggctaatgcttggaagaacttctttgataaggctcaatctgattggggtaagcctagtttcaaatcaaagaaagcccctagacaaagctttaaaactgatcgagctaagattgttaatggcaagcttcgacttgataaacctagaagtgtctcaaaagaagattggtttgatttgtctagttatggggccttaaagatgagtgaagttaaagtagtaagtatcttcaaagaaaaaaacgcttattatgcggctcttccctatgaagaaaagattgaatataaatctaaaactcatcaaaagacagcagttgatgtcaatgtcggtcactttaattacacagatggacaaatcaatgttttgcctgttaaactgcaaaaactatataaacgtatcaagcattatcaaaggatgctagcccgtaaaagagaaattaatgggaaatcagctattaaatcaaataattactctgcagtgagaaccaaactgcaaagagattatcgcaaggtagctaatattcaaaatgatcttttacagaagtttactactaagcttgtagataattacgaccaaatcgtaattgaagacttagcagtcaaagacatgatgatgacgcacgtagcttcaaaaggtatgcagaggtctttatttagtaagtttagacagatattaacttataagtgtgattggtatggcaaagaattaatcttagctgataaaacatatccatcaacacaaagatgcgctaaatgcggatacgtcaaaacgggtgatgaaaaaattactttgcaaggcaatcaaaagcatggcaccaaacataatgagtatatctgttataagtgtgattacagtaatgatcgagatgaaaatgcagttttaaaccttttagctttagcaagataaaaaaataaaaacaaaggggctggctaggccctaaagctgtgagagctagtcaatgtgattactcctaaatggaatatcagaatactaatgaagacaacagtaaataaaacaaagaaagggaaaatatatctttctgatatgtagaaaatacatattcttctacatatttccatgttttatatagcagtgaaaaaatattgaaatatccagtaattatttgtgatgatgatagaacactagcaaataatttagcaaacaatgtgaaatacgcagctgagaatttagtggaagacaatacagcttatgaaaatgtggagattagtgtagagcaagttgccactacctttgagcaagtcgtaagttatgtagtggctaaggatattcaaaatgcaatttacttcttagatattgaattaagtcaaaattctgaagctaagaatggagtagatttagcagaattcatcaaaaaacaagatccgaatgctcagattatttttgttactgcttatgataaatatgcccccttaacttatcgaagacgaattggtgcaattgattatattaataaagcactagaccaaaatgatatgatgaagcgtctagaagaaacaattactggggcgattcaaagtattaacaatcttacaaagtctggaagaaaagagcttgtttataaagtaggccgcaggataaataaggtagaagatactaatatctattatcttgaaaatagccctacacaacataaagttacgttaataactgaaactggttcagccgaatttagaagtaatatttcaaaaattagtgatgaaaatgactttcttgttaaagtatctcaatcttgcgtagtcaatccaaataatattgatagcattgatttttcgaaaaagaccataacatttcctaatggtgacgaagtaatatttgctcgtagttgtagaaaaaatgtcaaaaatttactaagtaaatatccagaaattaacgttaaataaaaggtaagacttatgttattcaaatataaatctgtttatgtacctcaagtagatgagatggattgcggagttgcttgtttagcgatgatcttaaaacaatatcattctcgtatatctttagctcatttacgtcatgaagcgcgtactaatcttgaaggaacaactgctttagggttagttaaaacagcccagaaatttaatttaaaaacagaagccgtaaaggcagatatgtctttatttaatgatgacggtattcagtatccttttattgctcacgtacttaaacagggagaattgcttcactattatgtggtgctaaaaaatactaaaaattatttattaattgccgatccagatccttcagttggtgtgataaaaatgcctaaagataggttcgctcaagaatggacagggattgcactctttatggttcccaatgaaaactttgaaccaattaaagaaaagaagaataacctatggtctctctttccatatatgtttaaacaaaagcggctaatgattaatatcattctagccgctttattaatgaccataattagtatctgtagttcatattttgttcaaggaataattgatacttatattccaagtggtacttatcagactttatcaatcttagcagtcggattgttaattgcttatgtctttaattctatcttctcctatggacagaattttttgctaaatgttttaggacaaagattaagtattgatttaaatcttcaatatattagacatatttttgaattaccgatggaattttttgtaacaagaagaacgggtgaaattacttcacgtttttctgatgcaagtagaattattgatgctttggcaagtacggttatctcgcttttcttagatctatcaattgtaatcgtaatgggattagtattagcggctcagagtatgactttgtttggaatcacattattggctttacctatttatgcagttgtaattctaggttttactaaaaagtttgaaaaattaaataatgagcaaatggaaagtaatgctgttttgagttcttcagttattgaagacattcaaggaattgaaacaattaaagcattaaatagtgagaatacaaggtatagaagaatcgatagtcagtttgtagattacctaaaaaaatcttttaaatacagcaaaactgagagcttgcagacagcactcaagacatttattcaattatctcttaatgtaattattctttgggttggtgcaaaagttgtaatgcaaggacaattgagcattggtcagttgatgacttttaatgcgttgctggcatattttattgatccactgcaaaatattattaatctgcaaccgcgacttcaatcagctagtgttgctcaaaatcgattgaatgaggtctatcaagtaaaaagtgaattcaatcagaagactgctattgaagattgtaagctcctagaaggaaatattgaatataagaatgtggattatcgctatggttatggtgcagatgtcttaaaagatattaatctaaaaattaaccagggcgaaaaattaacgattgttggaatgagtggatctggaaaatcaacaatggttaagttgttagtagatttcttttcgccaagtaagggtcaagtcattttaaatggccatgcaacaagtgagattaataagcatagcttgcgatcatatgtgaattatgtacctcaaaccccatatatcttttctggaacagttagagagaatttgttgttaggttgtaggccagatatcactgaagaagatgtaatagaggcttgtcagattgctgagattgaccaagaaatagctaatctacctttgcaatttgaaacaaaattagatgaaaatgcaaaaattctatctggtggacaaaaacaaaggttaacaattgctcgggcattattatctcctgcaaaggtatttatctttgatgaagtaacaagtggcttagatacaattactgagaagagagtaattgataatttgatgaagctcaaagataagacaattatttttatcgcacaccgtctggcaattgcggaacgagcagataaggttgttgtaattgatcgtggccagatagttgaagaaggcagtcacagcgaattgatgaatatgcatggcttttattatgacttagtgaagggataggtgagtacagatggatgcaaagaattatgaaagtaccgaattctattcctataagtatagaaatttttcgactatgattattattccagcagctatttttgtcttacttttatttgttggatctttttttgcagttaggcagaatacagtctcttcggttggcgttgttgaaccaacggttgtaattaagcggaaaaatgttaactatgatgagggacaagtcgttacgaaatatggtcaaaagtgggtagctcatgttgatcaaggtggtgggattagtttaatgcctgttatgaaacctaaaagcaaagtaaaaattgtaacttatgtgacaagtgataaaatctcgactattaaaaagggacagtcgttaaccttttctgtacctactggagatggcttaactagacacttgactggtaaggtaaaggaaattggagtctatcctgtgaacatgaataaacaaaatatgtacgaaattatttcgactgcaaaagttaatgatgagaatattaaatatgggatgcaggggaatgtgacgataatgaccggtaggagtacgtatttaaaatatcttttggataaggtaaggaataataagtaaaaaatactaatttagttaataaaagtaattttagacacaaatagaacaatattggtcaattttatatcttaagatgataactttagtaagctatgcatataaataaaattttaggaggtttctatcatgaaacaatttaattatttatcacataaagatttagcagtcgttgttggtggaagaaataattggcaaacaaatgtgggaggagcagtgggatcagctatgattggggctacagttggtggtacaatttgtggacctgcatgtgctgtagctggtgcccattatcttcctattttatggacagcggttacagctgcaacaggtggttttggcaagataagaaagtaggattttgacaatgaaattaaatgacaaagaattatcaaagattgttggtggaaatcgatggggagatactgttttatcagctgctagtggcgcaggaactggtattaaagcatgtaaaagttttggcccatggggaatggcaatttgtggtgtaggaggtgcagcaataggaggttattttggctatactcataattaaactatagtcaattaaagtaaaacagtgatgatttgatatttagcactgcattactttattcatagattcattagtaggtagtttaaatgactaaacattataaaattattggtctaaggatattgtcatgggtaattacgattactggattgataatatttatcggaaatgttcatgagtatggcttacattttacttataatcaagtattggcaataattattgtgattttacttttagttactactatgtatttttcagttacacccaaattattgaaatggaatgaaaaatatgagcttgtatggtggttatgctatttatgtgctcctatatatctctttttaactaatttatataattcaacagatcttggttatactatcaagttttggcttttctttggtggaggagcagctttaataatcataagtaagtatattttgaaaaacaaaaaataaagtctaaataatttatctatttcaatcgtatataaataaaaattagaataccaaattggtctgtaaaacgactaatttggtattttttatcttatgaaattttgaacctgataaaatttttaataaggtaaaaaagagagcgtgataaaaatggaaataattaaaaataatgaaaagatagcatcaaataaagaaaaatggataacactaattctagctgctgcttttggatattcaatgaataaattgttttcgctgattgtaaaattaaattgaacacttgataaaaaataaaaagtccattcggacctgtttgatagaatgttaataaccacaaaaactttctattggaggtcaaaatggactctttacattctaccatgaaccagcacgttaaaggcaagcatttatcatttgaagagcgagttattattcaattgcgtttgaaagatggctattctttgcgtgcaattgcccgtgaacttaactgttctccttctactatcagctatgaggttaagcgtggcactgtaaaactgtatcatggtaaagtcaaaaaatataaggctactcaagggcatgatgcatataaagctcatcgtaaaaattgtgggcgcaaatcagactttctcaggaaagctcaattcatgcgctatgtccacaagcatttttttaaagatggctggtcgcttgatgtgtgcagtaatcgtgctactgctgttggcgaattcgctagcagcgatgttgtctgcaccaaaactctttataattacgttgatcaaggcttattaggaatttataattacgacttgccagagaagcttaaacgcaatactaagcttcatcgtattcgcaaaaataagaaaaaacttggcagaagcattgaagaacgtcctaaagagatcaataaacgtaatgaattcggtcattgggaatgcgatttagttctcggacataagagcaaagatgatgaggtactgctaaccttatctgagcgtatgagtcgtgagtttttaattcttcgtattcctgacaagacttctgtcagtgtcatgcaggcctttaaagaactccaaaggcaatacagcgaacattggaatgatatttttaaaaccattaccactgataatggctcagagtttgcagatctttccaacctagaaaaagtatccaatacactggtttactatgcccatccttacacttcttgtgataagggaacagttgaaagacacaatggtcttattcgcagattcattcctaagggagaagcaatagctaactattctttacaagacatcattaatattgaaacctggtgcaattctttgccaagaaagatactggcctatcatacaccagatgaaatctttgaaagagaattagatctaatctatcaagcagcttaactaaaagtgttcaatttattattgcaatttgcgagattatttttgttactgcttatgataaatatgcccccttaacttatcgaagacgaattggtgcaattgattatattaataaagcactagaccaaaatgatatgatgaagcgtctagaagaaacaattactggggcgattcaaagtattaacaatcttacaaagtctggaagaaaagagcttgtttataaagtaggccgcaggataaataaggtagaagatactaatatctattatcttgaaaatagccctacccaacacaaagttactctaataactgaaactggttcagctgaatttagaagtaatatttcaaaaattagtgatgaaaatgactttcttgttaaagtatctcaatcttgcgtagtcaatccaaataatattaatagcattgatttttcgaaaaagaccataacatttccgaatggtgacgaagtaatatttgctcgtagcttcaaaaaacatgtcaagaatttactaaataaatatccggaaattaacgttagataaaaggtaagacttatgttattcaaatataaatctgtttatgtacctcaagtagatgagatggattgcggagttgcttgtctagcaatgatcttaaagcagtatcaatctcgtgtgtctttagcacatttgcgtcacgaagctcgcacaaatcttgaaggcacaactgcgctgggactagttaaaacagcacagaaatttaattttaaaactgaagccgtaaaagctgatatgtctctttttaatgaggatactattcaatacccttttatcgtgcatgttcttaagcaaggagaattacttcattattacgtagttcttaaaaatactaagaattacttagtaattgccgatcctgatccatcagttggcataataaagatgcctaaagataaatttgctcaagaatggactggtattgcgctttttatggttccgaatgaagattttgaaccaattaaagaaaagaaaaataacctatggtctctctttccatatatgtttaagcaaaagcggctgatgattaatatcattttagccgctttattaatgacaataattagtatttgtagttcatactttgtgcaaggaataatcgatacttatattcccgatggaacttatcagactctttcaattttagctgttggactattaattgcttatatttttaattcaatcttttcttatggacagaattttttattaaatgttctaggtcaaagattaagtattgatttaaacctccaatatataaggcatatttttgaattgccaatggaattctttgtgactagaagaactggtgaaataacctcacgtttctctgatgcaagtagaattattgatgctctagcaagtactgttatttcacttttcttagacttagcgattgtaattgtaatgggactagtgttagctgctcaaaatacaacattatttgggatcacattattagctttaccagtgtatgcgatagtaattctaggatttactaagaaatttgaaaaattaaatgatgaacagatggagagtaatgcagtactaagttcttcagttatcgaagatattcaaggtattgaaactatcaaagctctcaatagtgaagatacaagatatcgcagaatcgatagtcaatttgtaaactatttaaagaagtcatttaaatatagtaagactgagagtttgcagacggccttaaagacatttattcaactatctcttaatgtaattattttatgggttggagcaagagtagtgatgcaaggagagatgagtattggtcaattaatgacttttaatgcattactatcttatttcattgacccacttcaaaatattattaacttacaacctcggcttcaatctgcgagtgttgcacaaaatagattgaacgaggtttatcaggtgcaaagtgaatttaatgcagatacttctatccagaactcagctgctttagaaggaatgattgaatacaagcatgttgattatcgatatggttatggtactgatgttttaaaagatattaatctaaaaattaagccagatgaaaaattagcaattgttgggatgagtggatcaggaaaatcgacgatggttaagttactcgttgatttcttttcaccaagtaagggagaagtaactttaaatggtcatgcaactagtgaagttaataaacataccttacgctcgtatgttaactatgttcctcaaacgccatatatcttttctggaacagttaaggagaatttattactgggatgtagagctgatattagcgaagaagaggtaattaaagcctgtcagattgctggcattgatcaggagatagctaatttgcccctacaatttgagacaaagttagatgagaatgcgaagattttatcaggtggacaaaagcagagattaactattgctagagcattactttcgccagcaaaagtttttatctttgatgaagtaacaagtggtttagatacaattacagaaaaaagagtagttgacaatcttatgaaactaaaagacaagacaatcatttttattgcacaccgtctagccattgcggaacgtgcagataaggtcgttgtaattgacaaggggcagattgttgaagaaggaagtcatgaagagcttatggagcaacatggtttttattatgacttagtaaagggataggtgaggataaatggacgcaaaagactatgaaagtacagaattctattcctataaatttaaaaatttttcgacaatgattattgttccagctgctcttcttgtcttcctgatgtttattggttctttttttgcaattagacagagtacagtttcttcagtcggagttattgagccagtgactgtgattaaacaaaaagctgctaattatgatgaaggccaaattgtcacaaaacatgggcaaaaatgggtagctcatattgatcaagatgatgcagtaaatttgatgcccatgatagcagccaagaaaaaggtgaagataatcacttatgtgccaagtaataaggtttcgactattaaaaagggacagaagataaacttttctgtctcaacaggagatggcttgaccaatagattaactggtagggtgaaggaaattggcgtttatccagtaaatgtaaataagcagagtggctatgagatcatttcaactgcgaaaattaatgatgagaatgttaagtatgggatgcagggaaatgcgacaattgtcacgggtagtagcacttattttgaatactttttagataaggtattgaataagagatgaatttggtcagaaaatgcaaaattagtattaaagcctacaagtttaatccattttaacattacattatagctatttaatattatagatattgaaggttagcaaaaagctaatccaaagtttatattataatttaaggagaattatatattatgagtaaatttcaacaattaacaccagaagatttgatggaaactaagggtggtaaaatttatcatgcaaccccttggcaaatttgtaactctaagacccataaatgttgggctgataatgcagctattgctagaacgtgtggtagagttattgtaaacggttggcttcaacatggtccttggggagcaagatagtttttcatttttaagtaatagctacataaatactccatgatagttatcatggagtatttatgtaaaattttttagtaaactacagtaataattataagagatgaggaaaattatgaaaataaatgactctagtcttaaagaaatacttataaaagcaaagaaccaatcggatgtagtaactgatttaaaagctcaggagctaatagaaggagctcttgaaaaattagataagaaaacaaacgtgaaaagagtaatttttaatctaaagcaagatattaatatgtattctgtagcgcatggatttaaactaccagaaactctgacaaagttacagcttttattagataaagatcctgataaatgggctggtgctggagaaactttgtcactgactaatttttagaaaaatacttttattaatttaaataaataacaaaattaaggagtgctaaggagtactctacaggcctataggggggagataaagatggataatacacagcaaaaaataaaaaagctacttctttttcaattaatcattaatatcttctttgccatatggtgtatatattatgaaggtaaaaatatctttaaaaactggaatatttggaatccggtttttattttaagtggattggtaatagcagctattctgtttattttaagatcaagaggaccaatcttagctaatatttcaaaattagttgacataatctttttgccatttagttttatttatctttttaattttgtctgtgtggctcttggagattatcttaattctagttttttctttgatttattatatgtaattgcgccattatttatttttattccggtagtaaaagtagattatgaaaatattcaatctaatttaggacgaatactttctatccaaattatttgcgaaatttttgtattaactaattataaggtcgattctaataagattttagataatgttaaccgtagtcaaattatcttctctatatttttagtattatttgcctatcttgttttaaagggatggggctatcatttttacctgggcttaaaactaaacaatcaatttcagtggaaagtatttattcccattctactttttggcttctatatggttttcttcaatgcctttttaacaaccaatcctaaatcaattggagaattgatttggaaatggaattttgaatggttgaatccagcagaatcacagtattttggtagttcactagaagtattcttaaatgctgcggatgctggtattaccgaggaagtttggcgatatcttacaattgttattcttttagtaatgcttaaaaataataaacataagatatctttgacgattctaattagtagcttactgtttggattacttcattttaatcagctgctatcaccagacagaaatttaaccgatgtaattattcaatcgctaggagcagttggattaggtatctttttaggaagcttatttctatactcagggcagatctggctcaatgttctatttcacttcttatttgatttagttgtgttttcgcttactccacttagctttgtagggagcggcattttaactatctttaattcaccagctttagctcacgttataataacttcgggattatttatacttgttagcgtaattttaataacgggaaaaagaagaaaatgtgttgaaaataatattgagagattaataatgcacgaaaattaagtaccaaattggtcataaaaaagactgatttggtcttttttatctttagtgagtttttgaatgatagaattataaacaaggaaaggatgataaaaatggtcataggatatatgccaattattttacttttaataattgctttaggtaatattgctgtttcattaaaagtgcataagatagtcagaacatctgacgcctcaaatatcttagtgcttggaatagtgaccatggttatttttgccttaaaagatttaaatgcattttcttggagttcagcaattgcttgtgtttttatgagcatcgttgtttttaaagatttgtacgatgagtatcaaatacaaataaagaataagtctgaggaacagaactaatgggaaagtcattaacgtttagatgcatctttgcgggagttgctttttgtttacttcaaactctaggagatatattggttggtagtcaactaactctttggataattctgggaaatattctgtggggagcgatttttgcttacttaatgtttaaattattaaaaagaatgcaaatgcggaaggagcataaaaggaaaggtacagatgaaatttattgaagctagcaagaagaaagatgcccatactgaggaatggatcgtaattattctcagtgtgatctttgcatatttgattaataaactatttttatctttgactaatagtactagtattacagcaagtcttgtagttctaattgcgagcatgagtattttttcaatcacttactattatggtaaagataaactccaacaaagattaaaaagcaaaaagtaagaaccaaattggttgtaaaaagggctaaatctgttaaattatcatttttattaaaaaattatagtaaaattaataaatgaatgataatatttaaacaatataatcctttggaggacaaaaacatgaaaaatgaattggcacaagtattgaatgatttcatttcacttgctaagactcattatgatcgaaaaggtaacgaatacttattagaacaattagagattgccttagataagacgaataacaatgttcaagatgcggtaaacgaagcacgaacaacctatcaaaatgtgaatacgatttgtttagtaaaccatctccatttagaaaaagatgaagaggcattacttgaaaaaattaaagaaatttcaatgagtaaaggctggcttggtggcttaaacagctggaatactaccaatacttggcctggaaggtaggaatgaaaatgcaagctttttattatgcaatgccaactttagcagtaattgtaattgcagcatatatttttacttcagttaagattcataagtttatctggttttcaccagttgtttatttagctttgataggaagtataggactctggattaaaattggtacaaatattttttctacctcagaaactggagttttcggattgcttacactagaagcaattctcttagagggaattattgaagaatatagatatcaaaaacagaatcttgaaaagaatgaagagtagcaaagtagctactcttttttaatatatcagctttatgtgcatcttttctcaaagtgaactaaaatggagctggaaaaaggaatagaagtgataactttgactgaaaaagatgatgaagacgatgagataattaaggtggctcaattatccgtcgaagatgcattaaaagaattaaatacagagcaagctggtttaactattgatgaagtacatactttgcagcaaacatatggaaaaaatgtttttgctaaagcaaaacaagaaccactatggaagaagtttatagctaactttacaagtttaatggcgattttactttgggtagcagggataatagctttctgcgcaaatttagtacaactaggaattgccatttgggctgtaaatattattaatgggatttttagtttttggcaggaatttcaggctgataaggcaaccgaagctttagcgaatatgttaccttcatatactcgtgttgtgagaaatggtaaagaagaaaaaattctggctaaagacttagtaccaggtgacatagtcaaactagaagaaggggacgatatcccagctgatattcgtgtgattgcggcaacaagtgctcaggtagatcaatcatccctaactggtgaagtaaatccagtgcataaagatacacatcgaattgaaaacgtcgaaaagaaaaatcatgctgatcttaataacatgattttttctggtacaaacatgatgaaaggaaacgttacaggtgctgttgttaagacaggaatgaatactgactttggtaaaattgctgaattgacacaaaatgttaagcaacaaaagagtccacttgaaaaagaacttgatactttaacgaaacaaatttcaattctagcaatttctattggtattattttcttcttagttgcaactttctttgtacattatcctttagtaaaagcctttgtttttgctttagggatgattgtggcttttattccagaaggattagagccaactgttacattgtccttggctggagcagttcaaagaatggcaaaaaagcatgccttgattaagcgtttatctagtgttgaaacgctagggtcaacttctgtcatttgttctgataaaacaggtactttaactaagaacgaaatgaccgtaaaagaactttggactttagagaagagctatcatgtttcgggtgaaggttatgcagtgcggggtcatattaaagaaggaccaacgcatatttttgcaaaagataatgacaccttgaaggaagtattacttggtggtgtttttgcagataatgcaagaattcaaaagcctgataagcaacatccgcgctaccaaatcttaggtgatccaactgaagcttgccttgaagttgttgcaagaaaaggaaagatagatgttgaagcagaagtagaaaagacaccacgcgttaaagaattgccatttgattcaagtagaaaaatgatgacagtaattcagagctccgatggtacacaccgtttcaatacctatactaagggtgccccaaattgtgtggttgataaatgtacttcttacctatgtgatggtaaaattcagcctattacccaggaaataaaagataagattatgagagcaaatgacggctatgctaaagatgccttgcgtgtcttagcagttgctggccgtaatcttgatcaaaagataatggataatttagatcttgcaacaattgatacagttgaaagagatctcaccttccttagggttaaccgttatgatggatccgccaagagccgaagtttataaggcggcacgtgaatgccgcaaggctggaattaaagttacgatggttactggtgactatggtttgaccgctaagagtattgctcgtgaaattggcttgactgatcctgataagccactgacagtcattactggggatgctttaaagacgatgcctgataaggagttaagacattatcttgaaggtgaagttgtttttgctagaatggcccctgaacaaaaataccgtgttgtttcgatgtatgaaaaaatgggtaaaatcgttgccgctactggagatggcgttaatgacgcacctgctttaaagaaagcaaatattggtatcgctatgggtggaacgggtactgatgttgcaaaagaagcagccgatatgattttgactgatgataattttgcttctattgtaggtgctattaaagaaggacgcggtgtatacagcaatattcgtaagttcttaatttacattttgaactcaaatatgcctgaagccgttccatctgttttgtttttactttcaggtggggcaattccattggctttgactgtaatggaaattttatttattgatctaggtactgacatgattccagctctaggtttaggacgagaagatcctgaaaaaggaattatggatcggcctccaagatcaccaaaggatcatttgattaataaagatgtcttggcaaaagcctttctctggtatggtttaattgcttcgataattgcgacagctgccttcttcattgcgaacttttatcgtggtcatatttttcctaatttgccagcaagcggctgggactatcgccaagcaactactgtaactttagcggcaattattttttgtcagattgcggcagtcttaaatattcggtatgctagacagtcaatgtttaacaaatatttctttaagaattcgatgatttttattgggatcattatggaaattgtcttactgctatgcatttcttatgtgccagtctttcagtcattttttggtacggagccgcttaatgcacatgattggattatgttagtatgtattccgttgcctctgattttaattgatgagttaagaaaatggattttaagaaaagagtcaaaaaataaataaactttaactgctagttttaactagcagttttttcttgctaaaatagtaaaaatacggaggtggcgaaagtatgaaaaaaggattagtaatagaaggtggcgcaatgcgctgcatgtttactgctggagtcatcgatactctgatgaaagcaggcattgattttgatggtgcaataggtgtatcagctggagctgcttttggatgcaattataagtcaagacaaatcggaagagttctgcgctataacgtaaaatatgctagtgacccacgtttatctagttggcaatcatggctaaagactggtgatttatatggagctgacttttgttatcgagaattaccagtagaattagatgtatttgataccgctgcttttcaaaaaaatcccatagatttttggtgtgtggcaactgacattaataatggtgaagcagtatatcataaattgatttcaggtaaagaagcagatttgcaatggattcgcgcctcttcatccattccagtttttgcgcggccagttgaaattgggagtcgtaagtattgggatggtggaattagtgattcaattccaattaaattttttgaaaaaattggctatgacaagaacgttgtcattttaacgcagcccctctcttatcgaaaagaagcaagtaaactatatccagctttagaattagtcttacatcaatatcctgctgtcttgaaaaaattaaagacaagagcaaaagattataatgatgtacttaattacattagaaaaaaagaagtacaaggcaaaatgttagttatcagaccgccttatcctttagaaattggcacaatggagaaagatccccaagaattgaggcgcgtataccaaattggtgtaaaagaagctaagaaaaatttacaagcaataaaaacttatttgagtgaataatcttcttgaatgacttgtctagattacatttcattcgctataattaacaaaagcttaaattttcagttttttaatagtaattgtagagggaatgaatgtaatgaaaaaaacaaaactgttaagctttttctttgcacttttgatgtttttctcactcggtgctacttttatcaagccagctcaagcggctagccaaaagcaagtagcagaaggtagtgtcttgaagaagattaaaaagagtggagaattagtagtcggtacatctgctgattatccgccactagaatttaccgcaagtgaaaatggtaagactaaatatgttggagtagatattgaactagccaaagatatcgccaaagacttgggcgtgaagttagttattaagaatatgtcttttgactcattgttagttgcactcgaaacaggaaaagtagacatggttatttcggcaatgacgcctactcctgaaagaaagcaaagtgtagcattttcaaaaatttactataagccaagtggtgaatatttcttagtaaataaaaaggataaagacaagtacacaagtattcaaagtcttaaaggtcaaacggttggagcacaaacggggagtaaccaatataatttagttaaatctcaaatgaaagattctaaattaaagggtcttgggaaaattaacaatcttgttttagccttgcaatcaggcaaggtttctgcagtagtagtagaagaattaattgctaaagcatatgccgaaaataatagtggcttagctgcagttcattcaaacttaaaagaaactcaagcgggaaatgcagttgcaattgctaaaggacaagatgatttagtagctcaagtaaataagacaattgatcaagttcagaagaaagatttgattagtaaagaatatttaccagcggctgctaaatatatgaagacagaaaagaaaagtaatacttttgccaagtacattccatatttctttaagggtatttggtacacaatcgtaattactattttttcagtaattattggtattgttttaggtatcattttagctttgatgcgtttatcaaagaatccaattttacactggcttgctgtttgctacattgaatttatccgtggtacgccgcaaatggtacaaattttatttgtttacttcggaattggatatttgatttctaatctttccgctttagttgcaggtattattgcgattggacttaattctggagcctatgtggctgaagatattaggtcaggaattgattctttaccaaaaggccagatggaagcagctcgctcacttggtttaagccgtcaaaaagcctttagatatgtcattattccgcaggcaattaagaacatttggccagctttaggcaatgaatttattactttattaaaggatagttcgttagtttcagtaattggagttgcagaactaatgtatcaaacacaattagttcaaacttcaacttataagggtgttctaccattatttattgccatgattatttactttattatgactttctcattaacgagattattgaatcactttgaaaagaggatgaagcgtaatgacaatgattaaggttgaacatttaaagaagagttttggaaaaaaagaagtcctcaaagatatttctgcaaatgttgagaagggaaaagttattagtatcattggtccatcaggttcaggtaagagtacatttttacgctgtcttaatgtacttgagacaccaacaagcggcaagataatttttgatgggcaagatttaacacatattagtgaaaaggaattagatattttaagagaaaaaatgggaatggttttccaaagctttaatctttttccaaatatgaatgtagttgaaaacgttaaattagctccgatgaaagttaaaggcgtaagtgaagaagaagctgaaaagcaggctttagaattgcttgataaagtgggtttgaaagatcgggctaagcaatatccttctagtttgtctggtgggcagcagcaacgtgttgcgattgctagagctttagcaatggaccccgaagtaatgctatttgatgaaccaacaagtgccttagacccagaaatggttggcgaagttttaaagacaatgcaagacttggcagattcaggtatgacaatggttattgttactcatgaaatgggatttgcccgtgaagtttctgatgaagtgtggtttatggcagatggatatttgcaggaacaaggaagtccagaacaaatttttgaaaatccgcaaactcctcgtgcaaaagattttctttctaaagtactttaaatattaatatttttttaaataagcactttctttttacaaggagagtgcttttttttataatagttgcgttagaaaagttaaaggggatgagtttaatgaagattagacaagctacaatggatgattatgatcaaattatgacaattttaaaggatggtgctaaccaactagcagaacgtggagttgaccaatggcaaggagactatccttcaccagatcaaattaaagaagatattgaaaaaggttttgcctatttagctgtttcagctgatggggaaacagtaggtgctatttctatagttgaagcaccagatcattcttatgatgatttgaaaggtgagtggcttctagatactgataaatatgttgtaattcaccgcgttgccattcattcaaagcacgcaggtcatggttatgctactaagcttttgactgaagtaattgattatattcgtgatcaccgtaaagatattgatagcattcgaattgatacacatgaaaacaatagcgcaatgcaacatctaattgataagatgaatttcactaaagtgggagaattgcatggagtttatcgtccagatgaaatttcatacgtttatgagaatgttagagaataaataaattttagctaggttgaaaaacctagcttttttgttgagtttaagcattctgttgacaggtactaatatgatagaatattcttgttgaatactgtaaattacatggagaaatcgatgagaaaaaattttaaatttaaaatagccgctgtttgtggactgctagctattttaatcggacttacaggctgtgctaacaataatagcaataagattactgttgttggatctagtgccatgcaacttttagctgagcaagctggaaatgactatcgtctgtctcatcctgacagtaatattgttgttcaaggaggaggttcgggaactggtcttagccaagtacaggcaggagcagttgaaattggaacttccgatgtttttgctgaaactcaaaagggaatagatgctaagaaattacaaaatcatcttgttgccgttgtaggtattgttcctattgtcaataagagtgccggtgtaagcaatttgagtaagcagcaattgagtgatatttttacaggtaaaattactaactggaaacaagttggtggtaagaaccaaactatcactgtaattaaccgttctaagggtagtggtactcgtggaacttttgagggtttagttctaaatggaaaaaagccaattcaggctcaagaacaagattctaacggtactgtacgtaaaattgtcagttctacaccagggacaatttcttatatctcattcccgtatgctaatgatgaaaatattcaaaaattaagtattgatgggataaagcctacgaataagaatgtcgagacaaatcgctggcacctttggtcttatgaacatatctatactaagggtaaacctaacaagaatgttcaaaaatttattgattatatgcttggaagtaaggtacaaaatgatttagtacctaaactaggctatattagtatcgataagatgcaggtcgaacgtgatagtaataatcatgttgttcaaaaataaagaataggacgttttgatgaataacaaagatcttaaaaaagtagttgagtctgctttagataagcaaaaagttcctcatgttaaattaaagaagataggtgcaagtaaggttgatgttgccagcttaactgagccatcaaaagaaacacgacaggaatattggggtaaagggttaacttactgcgccattattttaattattattttggttgcttcaattattggttttattggatttcatgggttggaaacttttactaaagatcatgtgaatgtttttcaatttttgacttctagtgattgggatccaggtgaaggaaagaatcatgttggagcagcagcaatgattgtaacttcattttctgtaaccttattagctgctttagtagcaaccccgtttgcaattgcagtagccttatttatgactgagtattcttctaaaaagggtgcacgctttttgcaatcagtaattgaattattggtaggaattccctctgttgtttatggattcttgggattaacagttattgttccttttattagaaatatttttggtggaactgggtttggtattttatcagcgactttagttttatttgtcatggttttaccgacaattacttcgctaactgttgatagtttaaaagctgtaccatctgattaccgtaaagcttctttagctttaggagcaactaaatggcaaacaatctataaagtgattttgcgagttgcctctcctagaattatgacagcggtaatttttgggatggctagagcctttggtgaagccttagctgtacagatggttattggtaatgcagttttaatgccagctaacttagtgagtccatctgctactttaactagtcaattaactagtcaaatgggaaacacagttatgggaacattaccaaataatgcactttggtcattagcgcttctattgttaattatgtctttggtctttaacttcttagtccgcttaattggaaagagaggacagaaataatgaatgcaaaaactcgtaataatattgctactgctggtatttatactttagtgagtattgtggtcataatcctctttgggattttaggtgatattctaatttcaggtgtgccgcatctttcatggcattttttatcttctgaagcttcttcttatcaagctggtggaggagtaagagatcagctatttaattccttatatttgttagttttaaccttaattatttcacttccaattgcgttaggggccggtatttatctagcagaatatgctaaagataattggtttactaacttgattagaacaacaattgaaattttaagctcacttccttcaattgttgttggtttatttggttatttattatttgtagtacagtttggatttggtttttcaattatttctggtgccttggctcttacattctttaatttaccaacgctaactagtaatattgaacaagctattgaaggtgttccgcaagcacaaagagatgcgggacttgccttgggcttatctaactggaaaacaattcgcgggatcgttttgccagcagccttaccaggaattttaactggtattattttgagtgctggtagaatttttggtgaagccgctgccttaatttatactgcaggtcaaagtggatctacaattgactatagtaattggaatccatttagtccaactagttttttaaatgtgatgcgtccagcagaaactttagctgttcatatttggaaggttaatactgaagggattattcccgatgcaacaattgtttcagctgcaacttctgcgttgttaattattgtggtgattttattcaatcttggagcacgtgccttgggtaatcatttataccgcaaattaacagctgctaagtcataaggagaaatttatgcaaaatgtaaatgaagccccgacatatattcatcaatttgataaagatgagcagattatttcgacgcaagaccttagtgttttttatggaggtagcgttcaaaagctttttaatgctagtcttcaatttaagaaaaaaactatcacagccttaattggaggatctggttcaggaaagtctacttttttacgttgtcttaatagaatgaatgataaagtggctcgagtagacggtgaaatttggtaccatggcttagatatcaataaaaacaatattaacgtttaccagttaagaaaaaatattggaatggttttccaaaagcctaatccatttccaaaatcaattagagaaaatattacttatgctctaaaagcaaatggtgaaaatgataagcaaaaattagatcaaattgtagaagaaagtttaagagcagctgctttatgggatgaggtgaaggacaagttagataagagtgcattggcaatgtctggtggtcaacagcagcgcttatgtattgcgcgagctcttgcattgaagcctgaaattttgctgcttgatgagcctgctagtgctcttgatcctgtttctacttctaaacttgaggatacacttaagcagttgagaactgactatacaatgatcatggtaacgcacaatatgcaacaagctagtcgtattagtgattacacagctttctttcatttaggtcatgttttagagtatgacactactgaaaatatttttactaatcctaaaggtgaaattacggaagactacattcgcggaagttttggataaggggtttactgtggaaaatattattacaagtaaagatgttcacctaagctatggaaatgttgaagctttacacggcattagcttagactttgaagaaaaagaacttactgccttaatcggtccttcaggatgcggaaaatcaacctttcttcgttgtttgaacagaatgaatgacgacatacctaatattcatattagtggtgagattaaatttgaaaataagaatatttatggtcctaaaatggatttggtagaattgcgtaaagatgttggaatggtgttccagcagccaagtccttttccattttctgtttatgacaatattgcttacggtcttagaattgctgggattaaagataaagaattgatcgaccagcgagttgaagaaagtttaaagcaagctgcaatttggaaagagactaaagataatttagatcgaaacgctcaagcattttctggaggacaacaacagagaatttgtattgctcgtgctttagcggttcgtccaaaagtagttttgcttgatgagcctacaagtgctctggatccaatttcaagtagtgagattgaagagactcttcttgaattaaagcatgattttacttttatcatggtaacgcacaacttacaacaagcctctcgaattagcgactatactgctttcttaatgagtggggacttaattgagtatggtaagacctcagatatgtttatgaatccgaaaaagcagattactagtgattatctgaatggacgttttggttaataaaggagtttttaagatgcatgaagtttttttagatgaattacgtaagttgaatactcgtttcatgggaatgggtattgatgttagtgaagcgattgaagaagcaacacaagcttttgttgaacatgataaaaaactagctcaaagcttagttaaagatgatcaaaaagtgtcacgtgctgctacaaaagttgaaaaaagaaccttaaaattgatggctcttcaacaaccagttgctagtgactttagaaatgttattagtatcttaaaagctactaatgatttagaacgaattggtgaaaatgctaattcaattgcttgggaaacaattcgagtaaagggaaatccccgtattccagaagttgaagcaattattaaatcaatggctaagaaagttaactttatgttagaccaagttttaaaggcctatgtacaaggtgatgaaaaattggctcgtgaagttgctaaaaaagatgatgaagtagatgaggattatgtaaaggctcgtaagttaattatttctggaattaagcaagatccagaagcagcggttgcttcttcaagctactttatggtaattcgtttacttgaacgtattggtgaccacgtcgttaatttagcacaatgggttatctataaaatgtcaggagaattagtagatttaaatactaaggatactgatgagatgaccgaattataaaattgaatatttttatgaagccggccaacaattgattgatatggttggtctacttaaaaaaatttgaatatagaaaaataagaaccttcaatttgagggttcttatttttatttaactttatatccttcagttgtaagcgcgtgcaaaaagtaaaaaagaaatctataataaaactataaattaagctgtaatactaagtagggggaagttatgcgcgatatagtacaaaaaaagaagaaacatcaatttccaacagcatatacagttatcattattgttctattattggtacagattttaacgttttttataccgtcgggtaattatgcaacgcttgaatatgatcaaccaagtaaagagtttgtaattacgaaaccaaatggtagcaagcataaagaagcagcaacccaaaaaactttagacaaatataaagttaagatcgatgttaaaaagtttactagtggaacgatctataaacccgtagctattcctgattcctatgaaaaaattaatcagaaaaagccaggactcggtggagcgatttatcaatttctttcttctcaggtaaacgggattgctcaaagtattgatattattgcctttgttttgattctaggtggttgtattggagttgttcatgcaaatggtgcaattgatgccggaatgcaggcactttctaaaaagattaagggtaagcaagttttattgattgttttagtaatgggattgatcgccattggtggaacaacctttggtttagctgaagaaacaatggctttttatcctatcttaattccagtcttcttattagcaggctttgataggatgacagttgttgcgacgatctttttaggtacaagtattgggacgatggcatcaactattaacccattctcgactgtaattgcctctaatacggcgggggtcaattttacagatgcattgccacttagaatttgtatgtgggcaacttgtgtgattgtagggatgatttatgtgattctttatgctaaaaaagtacaaaagaatcctaaagcttcatatgtttataatgacttcgctaaagaagatcaagaatatatgaatcagaatcaaagtatgcaagaaagtaaatttacttggcgtcaaaagttaactttacttgtctttgcgattgcctttatcgtaatgatttggggtgttcaacaaaagggatggtactttactgaaattgccgttgtcttcctagcaacgggctatattttcgcctttatttcaggcttaagtgagcataaatttgttgagagctttgtaaatggtgcggcagatttattgggtgtagctttaacaattggcctagcacgtgctgtttcaattgtgatggaagaaagtcatacaagtgatacaattatgaatttctttagtcagcaagtttctggaatgccaccattattgtttatttggtttatgtttttagtctacattgttcttggtttctttattcagtcatcttctggcttagccgttctttcaatgcctattatggcaccgctagccaacgtggttggaattgatcgcgcaagcattattgatgcctataattggggtcaaggatttattagtttaattgcaccaactggattaattttaatgagcttaatgatggtaaatattggattcaataaatggtttaagttttgctggaaactgttagttattgaatttggaatttgtttagcctttttggcaattggtttagttgtttactaactaagcaaataagtagcttttagtattttttatagttatgatgaagctaaagacattgtttaatattttaaggaggcatttttatggcttatccaaaaactaaaaaaattatgaatgaaattgttgctgatttaactcaaactcacatggttgttcaccaacaccattggtacatgcttggaagaggatttttgaaattgcacccatatttagatggtgtaatggaagaattagctgagcagcaagatggggttgctgaaagattgatcgccattaatggtaatccgatttccacctacgaagaagtattggaagaaactaacgttccagatcaaatcggtagttgggatttgtcaattgaagaaagattccaattaattataaatgcatacaaacaattgcgagatgattatgaaagagggatcaagattagtgaaggagaaggagacgactcaactaatgacctattgatttcctatcataccgcgatcgaaaaaagaatttggatgatgtcagctgaacttggtcaacgtccaggtgaaggtgaataggaaaaatatatttatgcaaagcattccgtgtatggaatgcttttttgctataattaaagtaaatattgccatacagggaaggaaataccatgaataaagttacaattgttgggtcaattaacgttgataatattatgcatattaagaaacttcctcaaccaggagaaacaatagcaatgtctgaattttcaaaagctgctggtggtaagggagcaaatcaagccgtagcaagtagtcgagcaaaaaatgaaacaatttttgttggacgtgttggggatgatgacaatggtcgctttatgcttgaacaatttaaagaaaatggaattaatgttgaccatgtagctgtaaccccaaaccaacaaactggacaagcctatattttgcttcaagagacaggacaaaattcaattattattcaacatggtgcaaattttgacgtaacagcagaagatgttagaaatgcgaaaagtcaaattgaagatagtgattttgtgattgctcaatttgaaacaccaattgaagcaacaattgaagcttttaagattgctagagaagctggtaaaattactattttaaatcctgcgcctgcccgtactgatattccagaagaattattagaattaaccgacttgattactcctaatgaaactgaagctgagagtattacgggaattaaagttgacagtgaagagtcaatgaagaagagtagcgagatttttcatcaaatgggaattaagggtgtaattatcacaattggtgaacgtggatcttatgtttcttatgaagatattgaagagattgttccagccttcaaagttaaggcagttgatacaactgcagctggtgatacattcttaggtgcattatctagtgaactaaagcctgatttaagtaacttaagagatggtgtgatttatgcatcaaaatcatcctcatttacagttcaaaaattaggtgcatttccatctattccaactagagaagtagttgaagaagctttgaaggagaaaaactaatgaataagacagagcaagatcaattaaaaaaagaagcagctactaaagcagctaagatggtagagcctaattctgttttaggagttggaacaggctcaacagttgcgttttttatcgatgcattaggtgaacgcaaagaaagagaaggttttagtttaaagcatattgttactacttctaaccgtagtaagaagcaacttgaaggactaggctttaaggttgatgagttagcagatattgatcaagctgatttaacagtagatggcgctgatcgagtagacgataatttagatggaattaaaggcggcggtggtgccttaactttagaaaaaaatgttgccatcaactcgaagaagattatttggattgttgatgaatcaaaactggttcaccatctcagcggtttcccgcttccagttgaagtattaccagtatctgctgaacaaaactttaaacgttttgaagcagaaggtttgaagcctcaatggcgtttaaatgatgagggcaagcgttatgtgacgcattatggtaattacataattgatttagctgctgatccaactcccgtaccacacggtttagctgattatttggaccacactgttggtgtagttgagcacggtttgtttttagacatgtgtgatgaagtcatcattgcacatagtgatggtacaattgaagataagaagagaaaataattattttttcaaaaactaatataatttttaaaagacttgatcagttcaagtctttttttgtaacaaatcttagttcataataaatatgatacgtaaatttagaaagaaggacctttatgtcaaaaaagcccttaattattagtacagatccaggtattgacgatattgctgcaatgacaatcagtctttttgcagatgaacttgatgttaaaatgattgttccaacctggggaaatgtttctttagctcacactttacaaaacactcttgatttagagaactttttacacacaaaagttcctgtagtcaagggcgctaatcagccgttagtacgtccagcaattagtgcagcttctgttcatggtgaaacaggaattgctggctttaaatttgaaaaagctaatgatgatttattagagccgggacttgctgctactaagatgtatgaagcaattaaaaacagtcctgaaaaagttactttattaggagttggtcctttaactgactttgcccttttatttaagcagtaccctgatgtggtagaaaatgttgctgaagtttatattatgggtggaaatattgggcatggaaaccatagtccatttgcggaatataatattgcaggtgatccagaagcagcacagatagttttccattccggcttgccagtttatgtagctccacttgaaattggagatgaagctcatttaactcaagatcagatggacaagattaaagaatgcggcgaagttggtaaaatgctttattcgatgttttctaatattcatgaacctgatggagatactcgaattaagatttatgatccgacagcggttggaattatgcttcatcctgaattctttactttaaagccagctaatgttgaaattgaattagctggacgctatacatatggtgctagtgtgatggatttcttaagtaaaaaacataatgcacagattgcaaccgacgttgatacagagaagtttgcagcttggttcattgatagtatcaagactgctaataatgggagaaaataatgactgatttagtctatcgctcagtaatgcgcgatattaaacaaaaaatacttaataatgaatatgaagatatgcgtttgcctgatgagcgaagcctaagtgactattatcatgtaagtcgttcatcgatgaagcgcgctttaggtttgcttgctcagcaagggatagtttttaaaaaaagaggtagcggaacatttattaatccgctctatttgaaaaatcaggcactttttaagtatgagggatcaaatttaggtattaccgattcctttagtgttcccggtaagaagcaaagtattgagctgttagactatcaagtaattaaggccgacgaagatttgagacaggacttgtttttaaaagagtcagattttgtttatcaaataaaacggcttcgtttgttagatgatcaaccatttttaattgaaacaggttttattcctattaagattactccagaattaaatccggatattcttaaaggatcgctctttaactacttagaagatacacaaaataaaactgtaacccgttcattcttaacaattacagttgagccatcaactttagaagatcagtctaaattgatgctggcacctaatgaacctgtaggtgtaatggaaggtattttctttttagatgatggaactccatttgaagtttcaaatatgagaattcattataaatatatgaagtacaatacttttgttaacttaagtcaagaataaaaataagccattgtttttctcggggggatgagagaaacaatggctttttgtatgggacgagtagcttaatcaaattgcaaactatcgtcaaccggggacagatatacatagtttaagttagtatttttacattgctcactgagggaattaattaaagtatcttgttccttagtaatcggaatttgcttaagtactatttgagattgcaaatacataactaacttattgctccaagcagctgcgtcatcgtggttttcagctttggctatgacttttaaaattgtctgctcaagcggaagatatgctttaatttgaactttattgaaactagtatataaatcttttaatactgtgataatttcatcgtgctttgtaatagatttttctaacatgataaagacctcactatcttaaataatttaactgatttctgggcccactaaaatactagcatctttcatgcttgaaaagcctattttgtatgaaagtagcggtttttgctaagtgtttatcttgatttaaataacattatactgatttaaatcagtgaatcatttcttaaatactgattaatccttaaaataaagctctaaatacagataaatacgtaaaatgaaagagctttctgataagattagacatatgaggtgagataaatgcaatcacaagttgaaagattagatttaattagacaaaaattagatgagaaaaaaacaattagtacacgtgaaattatgaaattgtgtcatgtctcttttgatacggctaggagggatgtaattaaattaaccagcaccggtcaagcgattcgaattcatggcggattgatgaaaattaaacaggggacagtgccagattataattctcgcgtccatgttttgtcgcctataaagaataaaatagctaagatgacagcaaaatatttaacagctgataagttgatatatttgaatgcttcgacgactatttcgcaattatgtcgctaccttaacgggttaaatgcaacagtgatgacaaattcgattgataatgcgggtgccttaatgatggataacttgcctaatgttatcttattaggcggctatttgaataaagagaaccactatacatcttctttaaatagtttaaaagaaatagatcaatatgaatttgatattgccgtaatcgggacatcatcggttaataaaaatggagtttttgtagttaatcactctgatgcacaaattgaaagagaagtagttaatcgaacaaaaacagttattttattggcagaagaatataaatttaaagaagatagatcttctccgtataaggtcatggattgcaaacaagctgatattttgattacagataataagcttgatccccagtatcgaaaatattttaaaaagaatattaagattcgggaagtacttgaggaggaaaatataaaaagtaagtaattataattggaccgtcccaatgtttttaaaagttgaatttttgcacttgatgctatatgatattactgtaataaggaaatgaaaactatttcaaggagatatagctatggcagtaaattacgattctcaagaatacttaaagagtgttgacgcatactggcgtgcagctaactacttatcagtgggacaattatttttaatgaataatcctttacttaaaagagaattaaaggcagaagatgtaaaacctaagccaattggtcactggggtacaattgtgccgcaaaactttatttatggacatttaaatcgtgcaattaagaaatatgatttaaacatgttctacattgaaggttctggtcacggtggtcaagtaatggtatcgaactcatatttagatggttcttatactgaacgctacccagaaattactcaagatgaaaagggaatggctaagttatttaagcaatttagttttccaggtggagttgcgtctcatgctgctccagaaactcctggatcaatccatgaaggtggagaattaggctactcactatctcatggtgttggtgcaattttagacaatccagatgtaattgctgcagttgaaattggtgacggtgaatcagagactggtccacttgctacttcttggttttcaagtaagttcattaatccaattaaagatggtgcagttattcctatcttgcaaatcaatggctttaagatttctaacccaactatcgtttctagaatgagtgacgaagacttaactaagtactttgaaggaatgggttggaagccatactttgtttctgcatataaagacggtgaatttaatgggtataaagaccacatggaagttcaccaagaaatggcaaagacaatggacgaagttgttgaagaaattaaagctattcaaaagcatgcgcgtgaaaacaatgatgattccttagtgaagtggccaatgattgtctttagagtacctaagggttggacgggtccaaaatttgatctagatggcaatccaattgaaaatagtttccgtgctcaccaaattccaattcctgttgctcaagatgacatgaatcataaagaaatgcttactgattggatggaaagttataagccagaagaattattcaatgaagatggctcaccaaaagatatcgttaaagaaaataccttatcaggcgaccaaagaatggctatgaatccagtaactaatggtgggattgatccaaaagtcttaaatatgcctgactatcgcgactttgcaattaaatttgataagcctggatctgttgaaaaacaagatatggccgaatgggcaaaatatttagacaagatgtctgaattgaacccaactaatttccgtggttttggtcctgatgaaactaaatctaatcgtttattccaacttttagataatcaaaaacgtcaatggatggaaagtattcatactccaaacgatgaaaacttggctcacgaaggtcgtgtaattgactcacaattgtcagaacaccaagatgaaggttggcttgaaggatatgtattaactggtcgtcacggattctttgctacttatgaagcatttggtcgtgtagttgattcaatgcttacgcaacatatgaaatggttgagaaaagctaaagagcaagcttggagacatgattatccagccttaaacttagttgatacttcaactgttttccagcaagatcacaatggttatactcaccaagatccaggtatgttaactcatttgtatgaaaagaatcgtccagatttaattcacgaatacttaccagcagatactaattcacttcttgctgtatctgataaggcatttagagatcgcgaatgcatcaatgttttagtaacttctaaacaacctcgtcctcagtggttctcaattgaagaagctaaaaaattggttgataagggtcttggttatgttgactgggcatcaactgataagggcgctaagccagatgttgtttttgcttcaactggtactgaaccaacaattgaatctttagctgccattgacttacttcataagaaattcccagacttaaagattcgctatattaatgtaattgatgttatgaagttaatgtccccagaaaagaatccaaatgcaatcagtaatgaagaattcaaccgtcttttccctaaaggtacaccagttatctttgcatggcatggatttaagccaatgatggaatcaatttggtttgatcgcggccgtggtaaagatgatgttcatattcatggctatgaagaaaatggtgacattactactccttttgatatgcgtgtcttaaaccacatggatcgctatgacttagcaaaagatgtagtagaaagtattcctgagctaaatgaaaagaatgcggatttcattgatgagatggatagcttgcttgctaaacaccatcaatatatccgtgataacggtaaagatatgcctgaagttactgaatggcaatggaatggtttaaaataaatatattatttttttaagatcggattaatttccgatcttttttaattgtagttattaaaaaatcattgtattgttagtgtgacatttattgttataatatattgaggaaagtaagtgtaattattaataaataaaagatattgtaggaagggatgatgagatggattttaaagatgttttagcaagtgaacatgcaacaagaaagtttactgatcaaagagtaagcgaaaaaactgtgattaaggtaatcgaagaggctcaaagaacgccatcattactaaattcacaaccatggcgaatttatgtggctgaaggtgaggttgcaaaagcaataagaaaagatcatgaagataaggtcttggctcatgaagaaccacatgaagattttgcttcattgctaaaagttgagtgggatacgtttccaagtaagaatatggcaacaatgagtgaaactttagattactttttacgtggtgaatctgatgctttcgatcaagctcaaataaaattgtttaacgctccggtgatagtatttttgactattcctaaaaaatctccagcttggtcaatttttgacttaggtgcgttttcgcaaaccttaatgttagctgctaataatcgtggtttaagtacaatgccagctcatgctttcgttaagtacccagatgtaataagaaaatatttggatattccagaagatgaatcaattggaattggtattggtttaggatatccgaacaagaaagcagcaatcaataattataagtctaaacgtgtatcgttagatgaagttttaaagattaaaaaagatatctaattaagaaactcttgaagaagttaaagtctagctaatttattagatgaattctttaagagttttttatttgtttatttaaaataaaattaaaatatggcataattataaaaaataaaggagaagaagaatgatgttattagtttctcctgagcaatgggctaattgggataaatggtttaattacacattgccaggctatattttaattttagggataatttttttatttgttggattgattccatttttatgcgtacataataaaattacttatactttatttggggtgacaaccgtatttttagtaacttttctggggatagcttattttaaaaataaggaatcaaaagaatatgtcaaagaaaatcactatttaacggcaatggttagagagtatgatgctcagattttttctaataaatattatgatccagaggaaatcgagatgtttaaatatgtagctgatattcagaccccgtctcatttgccttccgtttacaaaaagataccaatgaagcaagaagttacctatcttggtaaaaatgattattatgcctttattaaattaaatgatgtagtaatgaagttcagtctggcagattgtaaaaaaattccaggaagtaaagcttactttacaggctatcattttaagattagaaataagaagtttttgaagttaggatttattgatttaaaacataatttacgcgataaagtagaactaccagccgattcctataacaagcaagtttcaagtaatattgaagaaaattataatcatcccggattagttgcaaactggatccctgattcagcaaaataatgctaaaatagagatgtaattatttaatatataaaaaaggtgaagatcacttgtctacaagtactataactactaatttaattgttattttcataacgtttttaattgcaattttctttgttgttgctgaatttgctttagtgcagactagatcgagtcagctagaagatatgctggcaaacggtcaaggcaaccctaagaaactaaagcgtgctctacacatggttcataatttgaatgagtcattgtctaccactcaagtaggtactactttagttggtgttattttaggttggattggtcaaggaactattgaagaactattgactgatgtgtttaaaaatgacaccttggtttggagcaaagactagcggagtattaggagcaactttaggtgttgtattgctaacttatttagaagttgttgtaactgaaattgttcctaagaatattgctattgacatgcccgttaagtgtttaatggcagtcgttactcctttagctgctttccatacgattgtatatccatttgtatggttacttaaccatagtgctaatggattgcttcatttattagggatgcagtcagctgatgaagaaagtgaagtttattcacaatctgaaatcttacgtttatctcgtaatgctgtaactggcggctcacttgataaagacgatcttttgtacatggaacgtgcttttgaattaaatgataaagttgctaaagatatcatgacagaccgtactcaacttcaagttttaaatgcgactgatgatgtaaaaacagctttagaaaaatatattaaagatggctttagtcgtttcccagttgtgcgtgataatgataaagatgatgttgtaggatacgtttatgcttatgatatcgtaagtcaagatcaggaaaatcctaatgttccgattactagaattattagagcgattattactgtgcctgaatcaatgttaattcaagatattttgaaattaatgattaaaaagcacacaccaattgttttagtagttgatgagtatggtggaacaagtggaattgtaactgataaagatatttatgaagaactcttcggatcaattaaggatgaaatcgatgatgtttcagacgaatatattgtccgcgatgatcatggaaatatccatgtttcaggaaagactactttatatgattttgaacgctacttccatactaagctgaaagcattcgaagatagtgatattattaccatcggtggttatatgatggaacactatcctaatttaaaacgtggtgagtctgttgatttagaaggctttaagtttaagctagtaaacattgaacaaggattcatgcgttggttcatcgtttctaagatcgatcaagccagtgaaaatgatgattcagaaaatagcgatcaaaatgataaagaaaaagataaataatcggaaaaagcacctcaagataggtgcttttttgtctaattaaatgttataattctactattaacaacgcatttataaaaggatatagagggttaaaatgcaaaatagtgataatattgacaacattattgatcgtgttttatttagtcaagatgacatcgaagagatttgtcaaagactaggtaagcaattaactgaggattatgctggtaagtttccattagtcattggggtactaaagggtgctgtatactttatgactgatttaacacgccatatgaatgtaaaaatgcaaaatgactttatggatgtttcaagctacggtgatggctttgaatcaactggtaaagttagattagatattgacgttcaagcagatgttaagggtagagatgtattactggttgaagatattgttgatactggtcatactctaaaatttatgaaggatctattaattgaacgtggcgcaaagagtgtaaagtgttgcgcacttcttaataagacagaacgccgtgaagatgatgtagttgtagattactatggctcaaaagttgaaaatgaatttgtagttggctatggattagactacttaaatgcatatcgcaatctaccttatgttggtgttttaaaaccagaagttattcaagcaaacttaaaccgttaatcattcaaaatatctttatcataaaattaaaaagggttgagactttctccttagctagtggaagtttcaaccctttatctatgagctttattattggcgattattctgttttttcatatagtaataaataggaaggcccaatagcgttagaccgataccggttattgagagccaaaattcattaattacagtactgatcacaatgaataaaccaccaccaattgagatgatcgggacaatcggataccaaggaacaacataaggacgttctagtttaggttcgcggtagcgcaaaattaccactgcaattgaaattaaggtggtaaaggtccacatgacgaagacgagcatattagttaacaggtcaaaagttcctagtagaatcattattaaagataccacgagaataattagggcactaagagtaggtacacctgtattaacattagtgcgactaattttatcagaaaatggtaacatcttatttttggctaaagtataaggtattctcattcccgtaagcataaaaccattaattgcgccataaactgaaattaaaattccaatcgtaactaatttaccgcctaaactaccaaataattttaacgaagctaaataggcagtattttgattgccaacaatttctttaaaggggatggcagttaaaaatgcatagttgactaatacataaattaaagtaatagccgatagtccaataatgatagctcttgataggtttttctcaggcttttcaatctcaccagctaaattagttacgttaatccaaccatcataagcaaataaagctgcaagtaaaccgccacttaagcctgtccaaaaagatgtattatgcccagcgcttaaagggaataagttaatatcgactttgcttgaattaaaaagaccgaaaagcacaattaaagcaattggaatggccttaagaatagtcatgactgattgcattcgggttgaaaactttgtagaaataaagtttaagcccattaaaaagatggcgagcagtagaccaattaaagttgcgtatttagcaggtaagttaaataaaacaacaaattgttgcccgaatattacacttaaagctgcaatattggcagggaaatagactagcatttgagcccagccaaataaaaagccccaaacttttccataagtatactcgatgtacttgatagagccgccagtaactggaagagcagctgcaatttcagatacggtaaggccagaagcgatggaaacaataccggctaaaatccagacgaaaagagttaatgaggaagtgccggtttcatgactaatgcttcctattttgaaaaaaacgcccccaccgattacagttccaacgactgtagctagggcttgaccaaagctaatttgtcttttcaagattgtgctttcctttcgatatatctataacttttagtaatgatatcattttatactaaatcttaatgaaagtggtgtagaaagaagaagttcgttaaaatagctaatggagggactgaaatgcatcgttatcgacataaatatactttcccaagtattattattttactcattctagctttttcaggactagtatggggatactttaatatgaggcaaaatacaactgttcctcgtggctcaaatatgagtgtattaggcattgaactagaccaaacaaaagattacattgatttacataagctagaaaaaaatggtatttcttttgtatatttgaggtcaacacaaggaaaatcttattttgacgataattacttactttatcgcgatcaaattcaaggaactaacttaaactttggtacaattattgcttatagtgatgaaacgagtaatcaagaacaataccaatactttttgaataaagttggaactaacaccggaagtttgcctgttatgattgtgccagctgctagtcacttgactaaatcatattggaagcgaatgggaatttttgctcaaatgataaataatcttggaaaaagagtaatgatagctggtgactaccgttatcataattattttccagagggaacacggttcttatatacgggagcaagtttaaaagatagacgacactatgctttttggtgttacactcaaaatggaagagttaaaaatatagataatctcgaacggaatgtaactatgtttgcttatattggtactaatacgcagtacgagcaattatatggtcagcaaggaacacaatagaggaaataaaatgtattcaaacgcaattacacaagttttagaaaaagaacataagaataaaccaaccttaattcaagaaagaacatatgatgctattcgtaatggtgctagcatcgtaggattagctaagactggtaccggtaaaactttagcttatggtttgccagtaatggagcgaattgccgaaattggtggtagaggcattattttagaaccaaccactgaacttgcgatccaaaccagaaataatcttttaccttatgcaaaatcattaggcttaaaaaccattgcattagttggagcaggaaatagaaaaagacaattagaacgcttaaaaaaggaaaagccggaaataataattgctacaccaggaagattttttgactttttatcagagaatcgaatcaagtatcaagacattaatgctttggtgattgatgaagcggatgatattttagaattcacaaaattagatttactgagttcattaggacaaaatttatcttcaactgctcaaattttactttttggagcatcagagtcagaaataacaaaagatgccgaagatttgtttaatcatattttcttactgattgatgtgcgaccagagcaaaaatctgaagttaaacattactttttacaagtctcaaatgaatataaaatgcagtttttgcagcggttggcaaagttagataagtttaagggtattctcttttttgatagtacagaaagtgaaatgagatttgcgcgaatttttagtcatagtaagacaaaatttgctgttttaagtaatgaaactagtaagcaaaatagagaaaagattcttagtgattttagagcaggacgaattaagtttttatttgcgactgatttagcagctcgtgggttagacttacctgatgttagctatgttattaactttgaaattccgagtgaagtaaatacctacttgcatcggagcggtagaacgggccgaatgaataaatcaggaactgttgtcactcttggggacgatcatgactttagagacttgaaaaaattactggctgatacttaccaagttcaaagagcatattttgcaggctatagtttaacgactgaaaaaccaaaacgaaaaaaagaagagccagaaactcaagagaagaaagtaaaggaaattaagcctaagcataaaaagaagcgttggcgcaataagaaaaataaaggatatcatcctcgaaaggatagaagagaaaaataatgtcatctttagttaaatggctagaaacttatgttttgccacctgcatcgcgtttagctcaactacgctggctagttgcaatgcgagatacttttatttctttactgccaattacaatggccggttcaattgcaatgctatttaatagcataattagagcagctaaagtacaaatgcattgggatactttttattctttaatgcagcctgtagtagcgattgacaatatcatttgggaaggtacatttgccctttttgcggtttattttgcaatttcttggggttatcacctagctaagacttatgaagtgaaccgatttgcaggttctgtcgcttctttagttgcttttgcaatgagcattagtgattctgttaaattgcacattgatggggatgtagttgatattaaaaatgcttttgatatcaaacaattttctacaatggggctatttacagctattatctttggctgtattggaacagcattatttattaccttttataaggctagaattagactaaaagtagatagtagtatgccgcatgcagaatgggttgcatttagtactttgatcccgatcctgctttctatttttattgtaggttttgttaattatgcttttcaaaggcttacaggaacctattttggtaattggctgcttactactattcaaagacccttggttaatttaggacagggctttggagttgttttattagttacatttttggttcagatcttctggttctttggaattaacgggataagtgtgctaactccagtaatggattctttgtggctgacaccagaaaatattaatgttacagctgttagaaacagtgagcatgttccttatatttgggttcgcgactcttttaatgtttttgcatggtttggtggagcaggcggaactctggtattaattattgccattttaatgttttctaagcgtaaagattatcgaacaatagcaaagatggctgtagcaccaggaatttttaatattaatgaacctattattttcggtctgccagttgtttttaatcctgtctatttaattccgtttgttgtagctcctttagtaaatgtatcattagcttattgggctacacaggctggtttagttaatccggttcaaatttttgttccaactgtaatgccgccacttattggaccgttcttagcttgcaattatgattggcgtgctattgtactggctctcattaatatggtaattgcgcttcttatttggatgccgtttgtttttgcggcagataagattgctaagcaagataataatcaacggaatttctatttacctcaatattaaatttatgatagtgaaaagctagtttttatgttaaagtagaaactagtcctgaccccgtagttcatctggatagaacaatggtctcctaaaccgtagaggtgagttcgaatctcaccggggtcatacatgaaaaaagcatttcttcaattaatgagaagaaatgcttttttatggctcttttgcaaatcctgttgatggataattttaagaaggaattaagcagctaagaaatagctgtttgattccttttcttttataatattttcttcgagtctaattctaattaataaatgtttgaaatttctataaccataagcagtacgttcaatttgtttaatcttacggttaactccttcaagacaaccattagaataagttgaggtaataccgtttaggacaccagaataattacgtttaaaagttaatagagtttgatgcatttgtttaccaacattttgttttgaatgaagtagatggataactttcttttcatcgttatcctgaatagcagtcataaagtcctgcataacccaataagtattttctaaggtttggtcacaatctaaaccatctaagacaacatgttcctgtgttagacagtccttaaaatgccagtcgtaataaggagtagtcttattaagtttgtcatatttcatgagataaagcttccaaggggactttaaaagcttatattcacggcttcttttattaaattgcttcatgatttgaactctgaaaatattaaacgatctagtaagcatttgaaccatatgaaaacggtcaataactatctgagcatttggaaataattctctagcaactaaaggataataacaattaagatccatagttactgttttaaccattgcacgagctttaggagtgaacttgtaaaaatagcgtagaatatcaggtttgaaacgagttctaagaatttgaacaactttgtgagtatcaccatctagacaaataaagtgaagctttttgcctacgcccttaaattcatcaaaagctaagtgttcagggagatgatcaaaggcatcatagaacttagaagagcagacttctaatactctttgaaccgtgttgacagatacattatgttctctagcaatgctggtcattgaacgatcttcagtaagagcagaaagtatttttcgcttagaagtgttagagatatagcagcctttattaaccagattagattgagccatagatctttttaaacagtcattgcagagaacacgttgttttcttaatctgatagtaacgggcttactagcatcagcagtaatgaaacgaacgttagagacgtaatgaccgttatgcttaagattagtagaacgacaataaggacaagtaggctggatcagctcagctaaatatattttgtaaatcttaccgttaatattttcatttgaataatcagaaaaaataatgtttttatcttcaatatcaagagtaaatttaatataatcatttaaagaggacatagtttaaatctccatacacttaattgaattggtcgaagaaggattttaagtaagagaggactatggcctctttttttacgtaaaaaaatcctgtcgatagaatatcatagatattcatcaacaggaaaaattatacagccgaaaaaagccgtggagcaactccacggctttttgcgattttaacgatcacaagtgatagaaataatttttctacttttatcaactgttatatcataaattcgatcttcatgaattagacgcttaataacaaattctacttcatcttgtctaataggacgtttatgattttccataacgatttcaattttatcagctgtttcgctgtatactactgtggtattacctaaagagtaaacttttacgaattgactattagtagctgctaattgtctttggactaaatcacggtagctatttgtaacatcaattaaatgcatcatatttataacctcgatatataatgtgtctttaaaatcccaatttaagtataacctttttgcagaatttataaaaataaaaataagagtcacggaacctgtgactcttatttgctcctaaataattaattttcattaattactattttaccgtcaactacattagcctttaggtctttagcagctggattatcaagtttataatcggctaccttatcttcaatttcttcttggatcgtacgacgaagtggacgagcacccatagaaggatcataacctttttcgacaagaagttcttttgcttcaggtgtaacatcaatatgtaggccctgatcttttaccatatcattggtgtttgcaagcattaaatcaacaatcttgattaagtctttcttatcaagtgcattaaattcaactatatcatcaagtctatttaagaattcaggtttaaagtattgacctaagctattcttaaattgttcttgatgactgttttcagctgcaaaacctacgctagcttctttgattccttgaccagcattagaagtcataatgatgatggtatctttaaaggaaactgtgcgaccttgcgaatcagttaagcggccatcatcgagaatttgcaagaataggtggagtacatcaggatgagctttttcaatttcatcaaataaaattaagctatatggattatggcgtaccctttctgttaattgaccagcttcttcataacctacataacctggtgcagatccgattagcttagatacagagtattgttccatatattcgctcatatcaaatcgaatcattgcatcttctgtaccaaagatttgcttggctaattgtttagctaattctgttttacctacaccagtaggtcctacaaataagaatgagccgattggacgaccagatttgttaaatccaactcgatttcgtcttattgcccgagcaacagtttcaacggctttgttttgaccaattacattatctttaaggtcagtagctaaattctttaattgagtttcttcttgtttttgtaagtcaccgacaggaatattagttttttcctcaacgatcttattcatgatcttttcagtgattttaggtgtttgatcaggatctactttctgatcttttaatttttcatacttttcaatctgatcacgatagtaggcagctttttcgtaatcttcattttttaaagcatcttgctttaagctttcagcagcatctagtctttctttgattttttcactatcaacataaggaatagtgagattcatccttgaaccagcttcgtctaaaagatcaatagctttatcaggtaagaaacgatcttgaatgtagcgtgaagaaagatctactgcagcttgtatagattcatcagtatagtgaacatggtggtaatcttcgtaacgcttacgaatgccttgcaaaatcttaattgtttcttcagttgtaggctctttaacctccactggttggaatctacgagcaagggcagaatccttttcgatgtttcgatattccttaatagtagtagcaccaattaattggaaatctccacgagctaaggctggtttaataatgttaccagcatccataccaccttcagcgttgccagcaccaactaattcatgaatttcatcaataaataggatgatattatcgttttgttctaattctttgattagttgttgcattctttgttcaaattgaccgcgaattccagttccttgaaccattgataccatatttaaagaaatgattcttttatcttgaagcttagctggaactgaaccgtcgacaatttgttgtgctaagccttcaacaacagcagttttaccaacaccggcttctccgataagaacaggattatttttagtccgtctgtttaaaatttcaataacgcgagcaatttctttatcacgaccaataactggatcaatcttacctttttttgctaagtcggttaaatctgtaccatactggtcgagtagggatttttgaccaccattgtttccacctctgcggccaccacccatttgcatgcgtggattatgtccttgaggattattttgttcattgttgttattatttaaggcgttgaataaatcatcaaaatcgccaaaaaatgcattgttattattcatactattattttgtccttgttgatttttcaattcttgataacattgttgacataatgagatttcacgatcttgcccatttacatttgtataaagatgaatagaggcaggacgttcgtgacagttatcgcataacattaatattccgcctttcttataatattcaggctatattcctattttagcactcttgatatatgagtgctaacttgctaatatcatagtacggatacttactaattgcaagtggtaagcccagatttttatggaaaattgatataataggataaagaaaaaattttttataaagatgcggaaacttcaaggagataagtataagaaatggattataaagaaatattagataaaattataagtggtgaattaaaagagtatagagttagtcccaaagatgcttttcaatttcaattagctcttagaagctatggtaaaagacagagtataactgggattgcccaaagaggtggggatataatttataccttatctgataatgaaaattaagtactttataatgtaaacatttacatttgtgttgttttcatttaaaaaacatgataacctaataaacgagtgggtataaaactcccgattatttttgattttaaaggagataatttaaaatggaaaaacgcgaatttcatattattgctgaaactggtattcatgctcgtccagctactttgttggtacaagctgcttctaagtttaactcagatattaacttggaatacaatggtaaatcagtaaacttgaagtcaatcatgggtgttatgtctttaggtgttggccaaggtgcagatgtaactattactgctgatggtgacgatgctaaagaagcaattgaagctattgctgacactatgaaaaaggaaggtttagctgaataatgtcgaaaactttaaagggaattgcagccagtgatggtattgcagttgcaccagcctaccttttggtagaacctgacctttcgttttctaaaacctcagttagcgatgttgatgctgaagtagctcgctttaaaaaagttgttgaagaatcaactaaagaacttgaaaaagttcgtgataaagctaaggaaagtttaggaccagaagaagcacaagtttttgatgcccaccttctattcttaagcgacccagaatttactggggctattgaaacagaaatcaaagatcaaaaaattaatgctgaagctgcattagatgaaactgctcaaaaattcattactatttttgaaggtatgactgacaatgcatatatgcaagaacgtgcagctgacgtacgcgatgtttcaaagcgtcttatggcacatcttcttggtaagaaattgccagatcctgcagctattgaccatgaagttgtagtagtagcctacgatttaacaccaagtgatacagctcaacttaacaagaagtacgttaagggatttgtaactgatgttggtggtagaactgctcactcagcaatcatggctcgttcattggaaattccagctgttgttggtactgaaactattactaaagatgttaaagatggcgatatgcttattgccgatggtttagacggcgatgctatcattaatccaactgatgctcaaatcgaagaatacactaagaaaggtgaagccttcgctaagcaaaaggaagaatggaagaagctaaagaatgaaccatctgtaactgcaaatggtaagaaatttattatcgctgctaacatcggtactcctaatgatatgaagggtgtaaaagaaaacggtgctgaagcaattggtttgtacagaactgaattcttatacatggattcaaaagacttcccatccgaagaagctcaatttgatgcttacaagaaagttatcgaagacatggatggtaagcaaactatcattagaacttgtgatattggtggagacaagcacttagattactgggatcttccagaagaaatgaacccattcttaggtgttcgtgctatccgtctttcaatgcaatacaaggatatctttagaactcaattaagagccttacttcgtgcatctgcatatggtccattaggaattatgttcccaatgattggtactttagcagaattacgtgaagcaaaacaaatcttagctgaagaaaaagataaactcgctaaagaaggcgttaagatcggtgacgacttacaagttggtatgatgatcgaagttccagctgctgctgtcttagctgatcaatttgctaaagaagttgatttcttctcaattggaactaacgacttaatccaatatactatggctgctgatcgtggtaatgataacgtttcttatctttaccaaccatacaacccatctgttttacgtttgattaagcacactattgatggtgctcatgaaaatggtatttggtgtggtatgtgtggtgaagctgcaggtgatgacattatgttcccaatccttttgtcaatgggacttgatgaatactcaatgagtgcaacttcaattttacgtatcagaagtttgatgaagaagatcaatactgaagatattaaagaattagcaaataaagcttgttttgtttcagaaactgctgatgaaaacaagaaattagttgaagaaactatgaagaagcttaatattcttgattagaaaaaagagtactaaaatagtactctttttttgttagaacttcacacaaacttcaatatttgttgctaaagtatactatgtaagctaataaaagaaatttgattacaacttataaaagacaagtatttgtgatacaatatcttatgtaagtgaaacagtagttatttttctacacgcaaaggagtgtggagttaagtgttaaatttatatacatcaccaagttgtacttcatgtcgtaaagctaaagcatggttgaaggaacacgatatttcatttaaggaaagaaatattttcgccaatccactaaataaagaggaaatcatgcaagttttacgaatgactgaaaacggcacagaagaaattatttctactcgttctcgtactttccaaaacttaaagattaatttagatgattatcaactaattgatcttgttgaaaagaatcctagcctattaagacgtccaatcattatggatgatagacgtttacaggtaggctacaacgaagatgaaattaggagatttcttcctcgtaaagttcgtcgcttagaacttgaagagatccaagcaatgactgctgatttttaattaaaaattgtaaaaacgttagcttttttaagctagcgtttttatatgagtaggaaaataggttacaatgtattaaagatagagacttcgaggtgataataagtggaagtacacagaataagtgaaaataccattcgtgtaacaatggacgcagatgaacttaaagaacgcggaataacaatgctcgacttgttaggaaacaaaagtcaaattcaacatttcttctatcaaattttaagtgaagtcgacacagatcatacttttgctaaaggagatcccgttacttttcaggtgatgccaagtagttctggattagaattacttatttcaaaagtacctgatagtgatgatgatagtagtaacaatccgaatgatcaattaagagatcttttaaagggattaggggctggagatgatgatcaacgcaaaactgaaattaatgatgatcgtgaaaaattagtcagtgataatcgtcgcgtctttaagctggatagtattgatttagttgcagccttagccgatgctttaaaggttgaaggattagcctccagtttatatacctatcatcatgaatactatctagatttagcctatttagatgataattatgtagaattgaaacccgaagatacttgggtaattgctaatgaatatggaactggaatgactgaaaagcaattccaaagaataaagaaaaatgctaagtgcttaattggccaagatgcattagggaatataagagaatatttcgattaaaaaagggagatgaaaaaatcatctctctttttgcgtatataatattgggcgataaaatgtacgcagctattttaaataaaaaattagtcttagccatcaaggaagcagaacaagttaataaaggatttaagaagttaaatcaggattattatacttgtccgtcttgtagaaaacgaatgattttgattctatcagaagaaaagctaccattttttaagcatttctatcaagttaggggaacaggagagaaagaagaacattatcaatctaagcaacttttatgtactgcactaaaagcaaatggagttaatgcagaagttgaggtcccattgcttgatcaacaattgagagctgatgtattagtagaaaataaattagcttttgaagtgcagtgtgctccgttaagcgagacagaatttaagcatcgacatagtttatatgaaaaattatctataaaagatatttggattgtgggtcaaaggcattatttaaaaaataaacttaatcgttcaaaagaaatatttctaaggtatagcccaaaatggcaatggtattatttagaaattaatccatttagttgtgtaattacattaaaatataatattttaaaggctgcagttagttcagaaataagttatgatataaaacatttttctttagatgagaagggaattgcaaatttatttacttttgctccaactaatcgacgaaatataaagtattcttctattcaagatcaaaaaatatatttacagaaacaaattactcataaaagtaaactagggttagaaattgcttctttgttataccaattacatttttcagtagcagatatacctgagaaactatttttagaactgagggagccaaaggaaaagagtccaataataacttatctacaaaaaaagctagatgattcaaaaaatcatctagcctaattgaattataacaagcgtaaactattatcactactagtctgtttatccccaacgattgcagattcaatttcttcacgatttgcgcaaccttcgatcatcataccagaatctccttggtcatcatcatagttaaaaataatggttgtaggagtagtgacgacgtttaagtcatcagcgagttttaaatccttatccattgagagctttatgtagtttgattctcgattctttttgaagttttttattgaaacatctaaagaatttagaatctcatcaacgagctctggagaataagttctattcatatcattaatcgcatgctgcaaattaatgatatattgtctagcctttttattgccgacaattaattttagagtgtgataatctttagttgcgttgtaagcactttgactaaaagtgttgaaaacttcgacattatttaaagaaagatgtctagctttgatatcgttccgaattgtgttcatcgtagttatgggaataaagtggtaagaaatattttgattgtaaccactgactgcagcgattatttcctgctcattttgataacagttaaccccaattggattaacaaagaaaaatatttcaaacattttgttatttcctccatccaagttcatgaatactgtatcagaaaatgaatgaaatggaaaaaaatttgttttattttttatgttcccaagcacgctgtactttactttgattagtattttccttattaactgtaaaattaaattgtttttctaattcagaaagtacctttttgatgatatcaggatcatcattttcaatttctaattcaaagtcatagtatccatctggaaattctgttaaatctaaagtcaattcacagttttctggaccgttagctagtattcttcgagtttgactccaagaaattaatttcaaagagtgaattgcttcattggaataatgcttttggaggtaatcaccaacatctcccccaaataaaaagaagtcaccttcatatgaactttgagtcatttgttcagcttgtgctacagatagtaaatcattaatttcgatccgttcactgtatttcttttccttaggattagtttctttaactttaatagtttgctctgcatgatcaacaagaattctgattcttaagctagcatcactattttttaaatcaaagtctggtgtatcaaaataataattcttttgaataaaatcagattttgcggtaaaagctgcacgcattttctcataggtttctttatctagtagagtttttgattcgatttctaaatttttactcataattttatcctttcactagttaatgttatccctctatatggtagaataattttgtttgaaacggaaaggatttatacatgaaagattgggatttatttttatggccttatcaacaggctgtttctgaattaaaagttaaatttcgatcacttagacaaagttttttaaacaagggtgagcattcgccgattgaattcgtggtcggacgtgttaaaacagttgattcaattaaagaaaaaatgacacggcgtgttattgcccctgaggtcattgagaatgatatgcaagatattgctggtattagaattatgtgtcaatttgttgatgatatctatcgagtagttgatttaattcatgaacggcaagatatgcaagtagttgaggaaagagactatattcaaaatgctaaaccatcaggatatcgatcctatcatatggtaattgaatattcagtttttttacctgatggaccaaagaaaataattgctgaaattcaaattcgtaccttagcaatgaatttctgggcaacagtagaacacacactgaactataaatatcagggaaaatacccggaagatatttctaagcgacttaagacaacagctgaggctgcttataagttagatgaagaaatgtcatcaattaaagatgaagtgcaggaagcacagagaatttttactaaatctaaaggaaaagagcaataatgaaagtcgcactcgtttataatgataaagttgaaaccttagcagtagttaaagcattagaaaaattactaaatgctagaaaaattgaaattgatcctgaaaatcctgacgtggtaattactatcggaggagatggaacattaatttcgggatttcataaataccaaaatctagttgataaaattagattcattggtgttcatactggacacttaggtttttatactgactggcgtaattttgaaattaacaagatggtagataatttgactaagaagcaaccatcttcagcttcctatccactcttggaattgatcattactactggagcaggtgaaaagaaaaagttgcttgcattaaatgaggcaactattaaacgagtttctaagactttaaaggccgatgtttacatcagagaccagttttttgaaagttttaagggagatggcttatgtgtttctacccctacaggttctactgcctatagtaagtcattaggcggtgctgtcattcatccacgtttaaaagctttacaaatgactgaaatagcttcaattaataatcgtgtgtttagaacactctcatctccaattgtaattgcacccgatgaatggatcaccattaagccggaaacaggtagtgatgatcattatgtagttacatttgatggttatgaatttaatcacaagcatattaaaaaaattgagtaccgtatttctcaacatgttattcgcttcgataagtatcaacatactcatttttggaatcgtgtagaagatgcttttatcggccaacctaaagataaacaataatgcaatattttaaattaaaatttgaaaataaaacacctcagaaactggggcgttttttgttaaaaaatggtttttctaaacgcgctttgactaatagccagcatcatggtgggatggttctagtgaatcatcaccgccggtatactagctacttgctgcatgctggagatgaagtaatttttattttaggagaagaaaaagaaaataaatggttaaagccctcgtctaagaagctaaatatcgtttttgaacaaaaagattatttagttattaataaagatgccggaatcttgtcaattccatctcgctatgaagatagtgatgcagtagtaaatcgtttattgcactattttcaacaacaaaaacaaactgatcttaagccacatgtgatcacaagacttgatcgagatacatctggattagttttggtaggaaaaaacgcagttgcgcatgcacgttttagtaagatggaaaagaatgagtttattaagaaatatcatgcaattgtgcatggaaattttgaagaagcacaaagacaaggaactattgatgcaccaattggcaaaatagatgccggagttaagcgcggagtagtaaataacggacaaagatcagttacaaaatatcgggttttagatcaagttaaaggtgctagcttaatagaattacagcttttaactggacgaactcatcaaattagagtgcacatgcaatatttaggacatcccttgttcggtgatcctttgtatggaattaaagataattttaagcgacaagcgttaaattgtttttatcttgaatttgatgatcctttttcagaaaaaagacaaaaaattgaaatagcagatcctattgatatggaaatattatggaagaacttgataagtaatgaattataaatataacagctaaattgattgactagtgtaaccgctttacatagaattaaatataagaagtgttaatactattcaaatatagaaaagaggatcacttgtatgtactattcaaaaggaaactatgaagcttttgcggatactaaaaagccggctggtgtagacaagaaatctgcttacataatcggtagtggattagcgggcctttcagcagcattctttttggttcgagatgctaagatgtctggtgataaaattcatattttagaagaattggatgttgcgggcggctctctagatgggactaaccggcctaatgctggttttgtagttcgaggtggtagagaaatggaagaccactttgaatgtatgtgggacatgtatcgatcagttccatcattgcggataccaggagcttcttacttagatgaatattactggcttgataaagaggatcctaactcctcgaattgtcgattgattcataagcgtggtaatgaattgccaacagatggactatatcaattgggttcgcatgctagtgaaattgttaagttagttttaacaccagaatctgaacttcaaggaaaaacaattgaagaatggttttcacctgaattttttgaaactaatttttggacttattggtcaacgatgtttgcttttgaaaaatggcattctcttgcagagatgagacgttattgtatgcgtttcattcaccatattgatggtttacctgactttactgccttgaagtttaacaaatatgatcaatatgattctatggtgaagccactacttaaatatctaaaagaccatggcgttaaatttgaatatggtgttcaagtagaaaatgtattagttgaccatgaaggaaatgaaaaagttgctaaaaagattgtgatgaagaagaacggtaagcaagaagatattgatttaactgaagatgacattgtctttgtaactaatggatcaattactgaaagctctacttatgggaaccaaactacgcctgcgccaattactcatgctaagggtggatcttggaagttatggggaaacttagctaaacaagatccggcatttggtcatcctgaggtctttagtgaaaacttacctgaaaaatcatggtttgtttctgcaactacaacgttaaagaataaaaaagtagccccttactttgaaagattgactaaacgtagtttgtatgatggaaaagtaaatactggtggaattattacggttacagattcaaattggggtctaagttttactattcaccgtcaacctcattttccaactcaaaagccaaatgagattgtagtctggatctatgctttgtattcagatactgaggggaattatattaagaaaaaggtagtcgactgtactggacaagaaattgctgaagaaatgctttatcatttgggtgtgccagaaagtgaaattaaagaattatcttcagaagaaaatatgaacaccgttccggtatatatgccttatattactagttacttcatgcctcgtcatgatggtgaccggccagctgttgtaccagaaggatcaaaaaatttggcatttattggtaactttgctgaaagccctactagagatacagtgtttactacagaatattcagttagaacagctatggaatctgtttatacactacttaatgtagatcgaggagttccagaagtttggagttctgtttatgatatccgggaattacttcgtgctatgtattacatgtctgataaaaagaaattagcagaccaagaaatgccattaccagaaaagttagctgtaaaagctggtatgaaaaagattaagggaacatggattgaagaattgcttgaagaagcaaatctaatttaaagatgtaacaatttatttgaatgagaattaacaaaaaagattatggtttgttttaaaccataatcttttattttgtcttttgtgttgcttgcttgaacatagagactaagttttttctaagcaagggatcatgagcataaagataagttcctttgattccccgcttaaataaaacatttaaagaattaagaaccatttcttcttcaagagttttgatttcacgaggatcagataaatcttttctctttttaaacatttctacatcagttattttgtctaaattaacacggattttgtttgtgccggggatttggctgatgggcggaccgataataataccagcatagtttaaatcaaatccctgacaagtatatattgagcctacctcatcaattgtttttggtatttcagcccaaggagtggcagtgtagttatattggtcccatggcattttgaattttccttcttggatgtaatgtttgcctccatctaaggtcgaaggatagccggatgtagaaagaactcgacttaatcctacttcacagttgcgcttaacgatttcctttcgcattttctcggcattatcaaaaatacgaaagtcatagttgctattagcattagtagggataggatcgatgattttatgtttagtaaatgaattgaaccaactaagtaattcagaagaagcagtcatcctaaattgatgttttaaatgatatttttgatgaggatagggatcgataattttttctaggcgatctttagtccaaagagttttcatttttagtacttgatatggatcaaatactaaaatcactaccttgcttcttttaataatttcagttaactgattttcatgataaaaattattgtaatgatctggcttagaaagaagtaagtgcgcttcatcgattataacaatatcagcgtgttcatttttcttatctaattgattaataaaagtagttggtctttgaaaatttttctttaagaggttaggtaaagttccagcaatttgacgataaactttcaaaatctctggatgattaacaagaaaataattgttagtttgataaatactactagttttatcatgacgtaatttttgtatttggtaaaacagggaagaaagaacaacgctttttcctgtaccagcctcgccatagatggtgaaaacagcgggaaagttccgattaatgtgttgtttagtaaaagaaataatttgagtaattagattttgttgttctattgttaatttcgtgaaaggtgaaagtttatcagctgcattattttgcatattgtatatcctttttccaataaataaagaaaagccatgaatattcatggcttaatttatagaatgagtttaatcttcttcaaataatacgcgtgtagcttcaggaacagaaatgtctttttgaattggagttagattaccggtttcagagtttcgacggtaaagagttgcgttattagtattttgattagctacaactaggtacttttctgctttatcccagttaaaatcacgtgggaaggaaccaaagacagagattctttgggctaattctagttttccatcatctaaaactttaaagacagcaattgaatcatgaccacgattagaaatataaataaattttccatctttagaaattcgaattgcagcagctccattatgatcagtaaaatcatccgggatagtcttatatgttgctatatcctcaaattcccaagtgttttcatttaaacgggcaacattaacctgactagataattcaccaacaatgtacatggttttaccatctggtgaaaaggtaaggtgccgagtaccaaagcctttttccatttgatagcgtgctaggtgttttaatctgttatcgtctaacttataaaaatcaacagcgtcgattcctaaatcacatgaaactaaattaccagcaggagtttcatcgaagaaatgtgggtgagcctgatcttgttctactcttggtccatgaccctcatgtttgtcgttagtaatgaaggttaattttccatttttgtcgtaagaaaacacattaatagttgctaagtgataatttgcagtgaaaactaaatgcttttgtggatcaacactgatgtagcaaggagctgctcctttgtgaaaataggtatctaatttttcagcttcaccatttttaattctataggtagcaataccgctttggtcgcctttttggatgatagtaaacaataaatcaccaactaattggaaatacgttggtctttcaacttcaacagtatttttaatattagttagtttaatatcagttccatcattttcaacattaacagtataaataccttttgagtcatggctcgtatagccaccaaaccaaactttcataatttttatgttagcctcctgataaaaactttccataacatatttattttctaccttttagtaagaataggcaatcgcaattaagtgttattggataaataagttgatatggtaaaatttaataaagaggttgataaaaatgaaatggaattctacaattactgctattggttcggaagcattagatccagcagataacatcgtaattttgtttgataataaagctactgataagttgcgggatgttgctgtattacaagggttcgatccagcaacaccagtagaaaaatttgtctttaaaaaagacgattctatcacaattgatggtactacttatctagccttatatgttgggccaatggttcaaatgaatatgcaagctattggtcatgctactttagtatttactaatgaagttccgaaaaggccaatgactaatgctatctatttagaaaaagattctaaagaaaaaatgcctgaatttaaggtaggcgactggattacctatgaacatagataagagggaaagctatggatgtaaaaaaacatcatcagaagagtaatttttttgttaagtggtttttgaataaccgttttagcatagccttacttaatattttattgttcttcctgatcattttggtatttaaccaaatttcttttgtgttaaatcctttttggacattttttaatgcaatttttccaccaattttagttgcatcaatccaatactatttaatggatccagtagttgactggatggagaaaaaattaaaagttccccgaataattacgattattctactatttgttattgttgtaggcggattgatttggatcattaatactttgatccctattattcagcatcaaactgattctctagtaaagaattggccaacttattggaaagatgcacaaaaaggtttcgaaaagataattcgcgatccacgcttaaatggagttcgcggaggaattaatcaagctatttctgatgcacaaactaaaatgtttaaaacaggtcaagatagcttcaatttagctttgagtaatttgtcatctgctgttaacgtaattacaatgatttttatgaccttattaacagcaccatttgttttattctttatgttaaaagatggacatcgtttgaattcctatgtgactaagtttgctcctaaaaaactacaacctagtttttcaagtttacttagtgatattaatggagcagttgcctcctatattcgaggacaaattactgttgccttctgggttggagtaatgtttgcaataggttattcagtaattggattgaattatggaattacattggcagttttagctggaattttgaatatgattccatattttggtacatttattgcctttattcctgcaattattttaggattaatcagctctccgatgatgttgatcaaagttttaatagtttttgctatagagcaaacacttgaaggaagggttatttcaccattagtaatgggaaataagatgaacatgaatcctgttacaactattttgctattaattggtgcaagtgcagtagctggactatggggagttatttttgccatccctgtctatgctgtaatcaaaataattgtaaccagactattcaattattatcgtaagatttcaaatctttatgatgatgagtcaatcgaagatagtgatactcaaggaagtaaagagtagaattgaagatagaattaagcgtggtacttgccatattacaggtgctgcgtttttttacaagaggagttttttatgacaaatcacgttgtactttatgaaccattgatgccagcaaatacgggaaatattgctcgtacttgtgcaggtactaatacagtgttagatttaatcgaaccgcttggctttcaaattgataataaaaaaatgaagcgtgctggattagattattgggataaagttgatattagaatgcatgatgatttagaagcttttttaaatacacttggtccaaatgatgaaatgtacttaatctcaaagttttcttcaaaaaattatgctcaagtagactatacggatcccaataaagattattattttgtttttggtaaagaaacaacaggcttgccagaaacttttatgagagaatattatgataggaatcttagaattcctatgtctgataatattcgttgttataatttatcaaattcagttgctatggttctgctggaagctttaagacagcaaggttttccaaatatggaaaagagccatcactatgaaaatgataagttaaaggataattacaatcgtcctgaacgttatgaaagaaatttaggagagaattaaaatggattttaaaaatatgaccccaatcgtagttcgttcttttcactatgatttaaatgatgaacaaaaggtgaaaaatgaagttaatgtttccttgcgccaggtttatcaagatttagaagatggtagtcaagatgaaggtaagaatggcaaatatttcgaaattgccgttccttttgaagtatcacctgctccaggtgactttacagttagtggagtaattactagagtggttcaatttgttgactattttggggatggttcagatttggaaccgtcagagtatcaactactttctagacctttagttgaagaaattgaaactttgacttatgaaattactcaattaactttagatcacccagttaaccttagttttaagtcgaactttaacgagttaaacaaggataatcaaaaagataaagatgacaaataaaaagattgagaaggtgtcttgatggctaaaaaacgaaaacgcagggcaacaaaaaagaaaaaaacaactactaaaaagaaaaagcaaagtatggactgggttattactggaatagtacttgttttagtagcagttttaagttgcgttcatttcggtttatttagtcaacaactaattaatttaattcgattttttgttggtgatagtcactatttagctagtattgttcttggtttgtttggcctagtgatggttatttataatcaacccccgcattttagcttgaaacgtgggagcgggttaggtgtattttacttgggcttactcctgtgggaaagttctcgcgtttttaatcaaatgatgattcatcagggatttgtaaatgcttttttgacatcaattagtgaggaattttcccgggcgcagattacgactaaggttggtggcggctttattggaagcatgttttatcaacttgtttttccaattttgggaaccgtaggatctgaagtaatatctttgttgatgatgctaatcggtattttaatgatctgtaacgtgaaatttgctaccttgctgtccggttttcaaaaaggttcacaattagtaattgagaaaaataaagatgctggggaagctttaaaaagtaaatacagcgatttagttgaaaagcatgagcaaaataagcaagaaaaattaaataatcgagaaaaactaaccgatcctttagataatcatgatgatactttcccaagtatgtctgattttaatagtgaacctgcggcttctaataaagttaaggaagaaagcagtccaaaatttgagcctccaattgaagtttcccaagaaagcactccgatagcaacagaagttgaagatacttctacagatgatttgccagcttcacattcttatgctgaagaagatcaaaagatgaaacaagaacttcaaactgttgatcatggagatttagagacaaaacaaagtagtcagccaaagaatcccaactataaaaagccgccaattaatttattgtcacctataaaaaatgtagatcagagtcaagacaaggctttaattcaaaaaaatacagaagttttagagtcaacttttaagagctttggcgtgcatgttatcgtaaaaaaagctgtattaggtccaacggttactcgctatgaagtccagccagcagttggagtgaaagtaagtaaaatagtcaacttagcggatgatcttgctttggctttagctgcaaaagatatccgtattgaagctccaattccaggtaaaccattaattggtattgaagtgccgaatcgaactacttctgccgtttcatttaaagatgttatggttcatcaagatgcaaaatcaaaagaggtttcgcttgatgtgccgttaggcaaagatgttgaaggaaaagtaatttcagcagatttacgtaagatgccacacttgttaatcgcgggatctactggatccggtaagtctgttgcaattaacacaattattactagtgttttgatgaaggcttaccctgaggatgtaaagttagtactaattgatccaaaaatggttgaactttctgtatataatggaattccccatttactaatccctgttgttacagatgctaaattagcaacgaatgccttgcgtaaaactgttaaagaaatggaaagacgctaccagctttttgctgctggaggcgttcgaaatattactgagtacaatcaaaaagtagttgaaaataatgctgataaaaataattcagcaatggaaaagctaccttatattgtagtgattgttgatgagttaagtgatttaatgatggttgccgggcatgatgtggaagatgcaattgttcgtttggctcagatggcgcgagcagcaggaattcacatgattttagcgactcaaagacctagtgttgatgtcatcaccgggttaattaaggcaaatgttccttcaagaatctcttttgctgtttctagtggagtagattcgcgaactattttggatcaagttggtgcggaaaaacttctgggacgtggagacatgctcttcttgccaattggtgctgctaaacctgaacgagttcagggagcatatatctctgtaactgaggtagaaaaaatagtatcctgggtaaaggaacaacaagaggccgtatataacgaagatatgattccttcgaaaaatgattctgagggtcaagctgagaatgaagatgagcctgaagatgaattttatgatcaggcagtagccttagtgagaaagcaacaatcagctagtgtttctatgcttcaacgtagatttagaattggatataatcgagctgcaagaattgtagacgaaatggaagctaaaggaattgtcggaccatccgaaggatcaaaacctagacaagtacttattccaccagaaaaggacgatgaccagtaattatgacaaatattagaattgaccataatttaaaatttaaaacagccacgttgggctgttttttacgtttacctttagataaaaaaacactggcattagcaaatatcttagcttgcatgcagagcaatgccactaaagaatttccgggtataaacttacaggcaaaaactttttctaacctttataatacgagtttgcaagtttttcctgaagtatttggaaatcaaatcgtagttttttatactataaatttcgttgaaccacgtgaaatcttagatccggactataattataaagtaataatggatgccttctttaaggtggtaaaagagcctctttttgatggtcaattattagaattagcaaaaaggcaactcgaacaagaaagaaaacaatattatgagttgccggcgaatgtttctttaagcggattttttaatacctggtatcgaaatatgcctagttaccaagatagtgtttttggggatgaaaagacactcaaaaacgctagtttagaagaaattaagtcattttttaatacgttgaaaaatgctccagctttttgtttaggacaagcacaagatcccgatagcttaactgacttagttcaaacacaacttgattggcctggctattttgatgattttgtagtttctacattgtctcttcctgcagaagaaaatccaattgaaagagagatacaatttaagagtgaacaagcacagcttttaattgggtatgggtatgatcaatctcttccaatatatttaaaacaatttggtggattatttttaggagaatatcttgctggggatgagtcgtctaagctctttactgaagttagaaaaaaactaggagcagcatatgcaattgatgcgactaattatctcaataattctctatttttaattagtacaggaatttctaaagataaaatagcagctgcttctaaagcaattaaaatgggtgtaaaagcagtacaagatggaaaagtgaatgaaggaattttctctaaggctaaatctgccttaaagcgtaactaccaaattagtactgatcggcaagatttgattttgattcagatgctagccaatgctctaagagggcgtgactatacttttgtacagagaattgctgatgttgatcgctttaagatagataaattaattgaattcagccaaaaattatactttaacgaaagctattgtttaaaatgaaaaaattagatgtaacaactagagattacaagtctggatttcgtgcaaaagtaattaggagaccactttttgcacaaaagtttatgggaataatcgtagattttggtggcagtgatcctcaaaaattatgtggtggagcacattttttagagcataaattatttactaaaaaagatggtgacatttcgcaacgttttgaagaacttggagcttcgacgaatgcgtttactacctataatgaaacaatgttttatgcgagctttactgaacattggcgtcaggttttaccattaatttttgaattagtcggaacaacgcatttcaccaaaagcaatgttgctaaagaatcaaaaattattgctcaagaattagcgatgtatcaagacgaccccaattggcaagtaaattatgaattaatgcaaatgatgtttccgaaaacaagtttggcagaagatttaaccggtacaaaatctagtttgaaaaaaatgacgccagaaattttacaagaaatttatgacaataactatgttagttgccggatggaatttgttgcttgtggtggattcagcgaaaaccaaactaaagaaattttacgtgaggtagggaaacttgagagtaaatatttaatttctaaaaaagttgcacctaaaaaattatccattgtaaattctcaaaaagagcataataaaattattgcatccgatttaattacgtctagggtcggtataggaataaaactacctgactttaaaaaagtaggtttgaggaatagcacagcacaaagtatttttgaaatgatgcttcaagcaaagctaggagtaactagtccttggtttgaaaagatgcaaaaacaaggtattctaaattcaccaatggagctgcaggtctcatatactactgcgggtaattttgctacaattatcggcgcttctagtaagccagatttgtttttaaagaatattaagagccaacttttggaagttcctgttacggaagagtcctttgtatttcaaaaaaaggaagcattggcacagactattagagaatttgatgatcttagtacaattgctattgaagaagcagaatatggacttgaaaatgacaattttaattcggcagctcaagcaattcaatctttaagttttaatgaattttatacagctgttgaaaatatattggataaaagtgatatatttactacaactttaaaaggtaaagaggaagctaactaaatgaagcgtgcaataattttcggagcaactggtggaataggaagagctattgcagaaaatatggctgaaaatggctggtctttatatattcattacaatcataaccaacaagaagccggtaaaatggtacaggaattcattgaaaactatccagaccaagaatttttttcattaaaattaaattttttggctgaagatgatgtaattaaaaaaataatatcaaatctcttaccaataagtgctgtaatttttacacaaggaatcactaattatcaatttcttggaagtcaagaattagatgaaattgagaagattatccaaattaacttattagctccgataaagataacttcccttttagaatcccagcttttaaagcaggcacatggccgaataatatttattggatctgtgtatggaggacaagcaagtgcgctagagagtgtgtatagtgccagtaaaggtggattatcaagctttgtacaagggtatgcacgtgaggtagcatcggctaatttaactgtaaatgtgattgctcctggagcagttgatacaccaatgaatgcaatttttgatgctgaaactttaaatgaagttaaaaatgaaattcctgcaggaagattggcagatccgaaggatatatctttttgggtagaaaatttgcttgatgaacgttcagactatttaactggacaaactatttatgtcgatggtggctggcttgtttaatggtcgattagtttggtatactcatatttgaattattgcaaaaagttgagaggatattatggcagatattggagataaattacgcagtgctcgtaaggcaaagggcatgtcaattgaagatgtagaaaaaataactaagattcagcgtcgatatcttacagcaattgaaaatgatgattttgatcaattaccgggagatttttacgttagagcctttattaggcaatttgctgatgttgttggtcttaacggcaaggaattattagcagattataaatctgaagtacctgaagcaaaaccagaagaatatgttgaaaattcaatcgacaataagagcgaaagaattaaagagacaactaatagtcgtaagggactatggcgtaactatttacctcaaattgcaacagtagttggtgttgttctagtaattctagtagtttatattgtttacactcgcttctttactggaaccaatcaacagtcagcaaatcaagctgagaatgtaaccgtttcttctcatatcaaatcttcaaaatctaaagcttcatcaaagaagaaatcaactccaaaaactacaacctcagaagttaaaatttctagtttaggtaataatagttaccgtgttagtggattgaagagtgaccgaactttaactttaggaaccactaagaatgatgtttgggcacaaattttagtaaatggttcttctgtttggcaaggaactttgaaagctaatgagaagcactcagttcaattaccagaaaatgtaaacaatgtttctgtacaaatggggaatagtgtatcaactactttgactttagccggtaagaaggtaaatgcacataatgcaactaatccagcttcaccaatgacaattagatttacatttgctggacagagtaatcaaagtagccaaagtagtagtactcgtcaaagtagtgcaactactcaaagttcaactaataatgtaaataatcaaacacaacaaaaccaacaaaatcaaaatacacaaaatggccaaactactcaaaacaatacgcaaaatacgcagaacacacaaggtcaaactaatactacccaaaataatggaggtcaaagtaaccgttaatgaatttaccaaataaattaactatgtttagaattttcatgattccagtttttatgctagtcttaatctttaattggccagcaggtagtgcaactttcttaggagcacatatttattggtctcatgtgttagcagctgtaatttttgcagtggcatcaataactgattttttggatggacatattgctcgttcaagaaacttagttaccaacttcggaaaatttgctgatccattagcagataaaatgctaacgatgacagcttttgtatttttaatttcattaaatttagcgcctgcatgggtagtagctattattgtttgtcgtgaattagccgtcactggtttacgtttgattttggctgaaaataaaggccaagttttagcagcaaaaatgccaggtaaaattaaaactacgactcagatgctctcgattattttcttattgcttggtgatgtgtactatattggtacaatcttattgtacatttgcttaatctttactatttactctggttacgattactttaagcaaagcggcgacgtatttaaaggtgaaatttaagattaaaagaagcagagatgcttcttttttttgaaaaaaattaataaaaaatgcgtaataaaaaatagagaaatataatattgaacgctagttcgtatttttcttgcttttaggtagtcaaaccaagtataattattataaatggaataaggaggaagagatttggctaaagatgataaaaagaaggctttagacattgccttaaagaagattgaaaaagactttggaaaaggcgcagtgatgcgcatgggtgaaaaagtagacactcaaatttccactattccttccggttcactagctttagatgcagctcttggagttggtggctatcctcgtggacgaattattgaagtatatggaccagaaagttctggtaaaacaactgtggctcttcatgctgttgcagaagttcagaagcgtggaggaacggcagcttatatcgatgcggaaaatgcgatggatcctgcttatgccgaagcattaggtgttgatattgattccttaattttatctcaaccaaacactggtgaagaaggtctgcaaattgcagatacgcttattgcgagtggtgcaattgatatcttagttgtggattccgtggctgcgttagtaccaagagccgaaattgacggtgacatgggagattcacatgttggtttacaagccagattaatgagtcaggctttacgtaaactctcaggaaatatctctaaaactaaaactattgctgttttcattaaccaaattcgtgaaaaagttggggttatgtttggaaatccagaaactactcctggtggacgtgctttgaagttttactctacgattagattagaagtacgtagagcagaacaaattaaacaaggatcagacgtaattggtaaccgagttaaattaaaggttgtaaaaaataaagttgctcctccatttaaagtggcagaagtcgatatcatgtatgggaaaggaatttctcaaactggtgagttaattgatatggctgctgataaagatatcattaagaaagctggctcgtggtattcatatggggatgatcgcattggacaaggccgcgagaatgctaagcaatatctagaagagcatcctgatgtttacgaagaagtaaaagaaaaagttcgtgaagcttatggaattgatgctaaagcaattgaagaacgagaaaatcctgaaaaggtaaaacaggacaaggaagtaccagtaaacaaagatgcttccgatgaaaaaaaataatcgacagatacagttaaaccttggcttttagaggccaaggttttttgtatgattgacatcacttccggatacttttattattaataatgtgtgaaataattctataaaaaaggcgatagtaaaaatatggtaaatacaattttagttcctgttgctgtcgctattgtttctgtcttagttggaggttgtgctggctatagtatccgtaaaaataagtgggaaactcaagcacagaatgcagcccatgatgcaaaacacatcttggcagatgcagaaagtaaagctaaagctgtagaagctgatcttgcttcacaaaaagaagcaatgaagaaagctgcagcagatgcaaaaaaagaaaaaattctggaagcacaagaagaaattcatcattatcgcgaaagagtggataatgaacttaatgaacgacgtcaagaggtttctagacaagaaaatcgcttactgcaacgtgaagatgctattgatcataaagatagtttgttggatcaaaaagattcacaactcacacagaaagaaaaccaaattaaaaaattgcaggctcaggttctagaaaaagaaaatagagccgatcaattagtgaccgagcgagagaaaaagctctatgaagttgcagagttgaatcaagaagatgctaaaaagatcgttttagataaactttcagaccaattggttaaggaaagagcagaaatgattgaagaaagtaatcaacttgctaaggcaaaagcagatcattttgctcgtaaagtaattgttgatgcaattcaaagtagtgcagccgatacggtttctgaaaaaactgtttcagttgttaatttaccaagtgatgatatgaaaggtcgtatcattggccgtgagggtagaaatatccgttcatttgaggctttaactggtgtagatgtaatcattgatgatactccagatgtagtagtcttaagtggttttgacccaattagacgtgaaattgcaaaaagagctttagagcgtttaattaaagatggtcgaattcatccagcgcggatagaagaaatggttgatcgtgctcgtaaagaagtaaatgatgatatttacgaagctggtgaaagtgccttaatggaacttggtattcataagatgcatccagaattggtaaagattttaggacgcttaaagtatcggacgtcttatggacaaaatgttttatctcattctattgaggtcggtaaattaacaggtgtgatggctgctgaacttggtttagacgaaaaaatagcggtacgcgcaggattattacacgatattgggaagtcaattgatcatgaaattgagggttcccatgtagaaattggtgttgaacttgcacgaaagtatcatgaaccagatttggttgtgaatgcaattgctgctcaccatgatgatgttcctaagttatcctttattgcagagttagttgtagctgctgatacgatttcttcagctcgaccaggtgctagaagtgaatctctagaaaactatattcgtcgactagaacaactagaaacgattgcaaagggacacattggtgtaaaacaagcatatgcaattcaagcaggacgtgagataagggtaatggttgagccagataagatctcagatgctcgtactactattcttgctcatgatattagaaatcaaattgaacaagatatggaatatcctggtaacattaaggttacggttattcgagaaaaacgtgctgttgcaatagctaagtaaagacgaatctttaagattcgtcttttttgtttaccgctttattgtgtttatattggggtgtaggtataatgaaaaaaagaagtttaagaaagtagattgttatgtttcaaacaattgttaaaatattcttattagtaattattactgctgctataactccttttattagaaaattagcttttgtattaggtgcagttgataatccaaatgctcgtcgcatcaataaaaagccaatgcctactattggtggattagcaatatttgtagcttttaatattggagaatttgtcttattacggaaggattttccgactcatgaacttttttcagtattattggcatccagtgttattatcttaactggtttgattgatgatattttagaattaaagccgagacaaaaaatgtttgggatttttgttgcatccctggttgtatatttcttagctggaattaaagtaagagagttaagcttgccatttttaggccatattcaactaggttggtggagttttccccttactattttttggattcttgccttaacaaatgctgtcaatcttattgatggtttagatggtttagctaccggtgtcaccttaatttctcttgtaacaatgggaattgttggtttcttctttttaaagagttggcaacactatgttccaattatgtgtattatgttagcagcttgtttattgggctttttaccttataattttcatcctgcaaagatatttttgggagatacaggtgctttatatattggttttatgatttccgtcctatcgttaaaaggattaaagaatgtaacttttgtgtcattattagttccaattcttattttgggtgttccgattactgatacagtttatgcaatgattaggcgaaaattaaataaaaaaaatatatctcaagctgataaacatcacttgcatcatcaattaatgcgaatgggattatcccatcgtcaaactgtgttagctatttatggaatttcacttattttttcttttgtttcattgctttcattagtgtctcctcgctgggggatctggttattgattttaggtctgttattcgcagttgagctttttgttgaaacgatcggattattaggcgaaaaatataaaccacttctgcattttcttcaacacactattaataaaatggaacgtgcagatcctgaagtaaaagtgagacgattaaataaaaagaatacaaataaaaaagatttacgttaaaacaacgtaaatcttttttattgttcgtggaaatttaaattagtaacaggaatttcattaaatctttggtctattttcttgaaatctacttttcccgataataaattaattagatcctctttaacttgagtgatttgatctagatctaggaaaatttggattgttacatcagtagtatatatttgattatcaattaggattttattttcatttaaatagtgattaacctcatcaagtcgattataaggaattgtaaattcaattaattgctgcatgacgcattttacaacgccaatattttgagcggcttcagttacggaatttgaataagcgcggattaatccaccagcacccaacttaatgccaccaaaatatcttgtgactacagcagtcacatcttttaatttcattaattgcagagcttttagttcagggatacctgctgttccggaaggttcaccattatcactggccttaacttgattatcatttaatcctaaagtataagcatatgtattgtgagttgcatcatgatatttttttgaaacttgctcaataaatgtttgggcttcttccactgttttagtacgagctaacgagcagatgaatctactttttttgataactatctcatgttgacccgatttactgattgttaaatagtttagttgttttgatgacaaaaaaatcgcctccatttgcgtaattaatatagggtgatattgatgagtgaattaaaaggacgccaatgaatagataatcaaaataaccataacataaatagtaagacgacaaaagttcctgcaatgataaatggtttatgccaacgatgtaacactaaagcagatgcaagattacctaatggatatttatattgccgagaatgtattggggttggaagaataagtgaagagaagaatttagaaagaaacattgaaaaaagtacctatcctaaaatagttactccactaagttggcagggaaaattaactaatcaacaggagttgatctctaatgagttagttaattcctttaaagaacgacgaaatcatttaattcatgcagtaactggagccggtaagacagagatgctttttaaagtagtagaagaagttttaaaaaatggtttccgaatagcaattgctacgcctcgaattgacgtagttgatgaattatttccccgctttcaagcagcatttgaaaatgtggaaattggaaaataccatggacgtgaataccatgatgcaaaagatgagcaatttgtcatatgcacaacacatcaacttttaaaattttaccgggcttttgatttgattgtgattgatgaagtagactcttttcccttttatgaaaataaaatgcttcattttgcagctaaaaatgctgtaaaagaaaagggatgtacattttttctaactgcgactccagataaaaaattactaaaacaggccaaaggtaaggcaattaattattctttactaaaaagaagatttcataagggattactacctgtaccgaaagaaaaatatttctttaaaccttttatttctcgtaaaggaaaagttcatcctgctctgattaaacagattaggaaaattatagatatgaacaaacctcttctggtatttgttccgagaatcaaagatttgcccatatataagaaacatttgactgctgtttttaaagagaaaaggatcgtgagtgtatatgcgggtgacaaagaaagacaaagtaaagtcgctagatttcgtaatcaagaaattgatattttactaacaacaacaattttagaacgaggtgtaacttttaaacatgttcaagtaattgtaattgcggcagatgatccaatttacaatactccaagcctagttcagattgcaggtcgagtaggaagaagtgcagacgatagagatgggctagttttattttgttatcacaaatatacaaaaaatatccgacaagcgatgaaacagattaggatgatgaataagtgaataattgtttattgtgtcactcctcttttcgcagagagataaactatgaaaaattgtttttatttgttaagtataaggaaagatatacttgttctgaatgtctaaaaaagtttgttaaaaagaaaggaaaattatgttcaggttgtaataaagaaataaatacagaggggctatgtaatgattgtctacagtggaagcggaaatatgcaggcaatttgttagataatcgttctttatatcaatataatgatactttccatgatgttatggtgcagtacaaaagatatggagattatattttgtgtcatgtcctagctgaattaattgatcagttaccagcagctgactattatgttcccgttccgagctcgcccagtcatctagaaaaaagaggatttgatacaatttatgctatttatcaaaagttagttcctttaacgaaattattagttaagtcagatacggagaaagctcagggagaaaagaatagggaagaacggttattgactaagcaaaccttttcggctatcgataataaaaatattagtggaaaaattttattattagatgatatttatacaactggtcgaacgttatatcatgcacgagatgctcttttagaagtttatcctaattgtaaaataaatagttttacaattagcagataaatcattagtaaaaccgcttacaatttgctatactataagtgtaaagaaaaacgtcataagacgttggaaggagaatctacaatgttaaaatacaatgttcgtggagaaaatgtcgaagttactgatgccttaagagattatgttcaaaagagattgaataagctcgaaaagtacttcgaaatcaattctgatgtaattgctcatatcaatttaaaggtttatccagatcatactgctaaggtggaagtaacaattccacttccatacctagttttacgtgcagaagacacaactgatgatatgtacaagagtattgattttgtttctgaaaaactagaacgtcaaatcagaaaatacaagactcgtattaacagaaagagtcgtgagaagggcttaaaagatttcttctatgaagacttagaagaagaaaagaaagcacctaaagaatttgatattgttcgtaacaagcatttggatttaaagccaatgagtgcagaagaagccgttttacaaatggacttgttgggccatgatttctttgtttttgaagatgcagatacaaatggaacaagcattgtatatcgcagaaatgatggtcgttatggcttgattgaaactaacgaataattaaaacaatcttataaattaagagtctcttgagcagcgataagcttaagaggctttttcttgcaatagtaggtttctcatttttacaaattaatgttaaaattacatagtattattttagatttgtgcacaaaatttaaatttaaggaccgattaaatggctaatattcttaaaaaaatttacgataacgatagaagagaattaaagaaatttgaaaaattagcaactaaggtagaatctttaggagacgagtacgaaaaattatctgatgagcagctccaagcaaagacaccagaattccgtaagcgtttaaaaaatggtgaaacgttagacgatattctaccagaagcatttgctacagcacgtgaaggtgcaaaaagagttttaggattatatcctttccgtgttcaaattattggtggtattgcgcttcattacggtaatatcgccgaaatgatgactggagaaggtaagaccttaactgctactttgccagtttatttaaatgctctaacggggaaaggtgttcatgtggtaacagttaatgaatacctatctagccgtgacgaaagcgaaatggggcaattatataagtggctcggtttatctgtagggttaaaccttaattcaatgtctgcagatgaaaagagagatgcttataactgtgacgttacttattcaacaaactcagaattaggatttgattatttaagagacaatatggttgtctacaaagatcaaatggttcaacgtccacttaactatgcaattatcgatgaggttgactcaattttaattgatgaggctagaacaccgttaattatttctggacaagcagagcaagcaaacagtgaatatattcgtgctgatcgttttgttaaaactttagttgaagataaaagtgatgacgatgtagatgatgatgaagaccatggtgactacaagattgattggccaactaaaacaattaatttgaccaatcaaggaatcaaaaaagcttgtgaacactttggtttgaagaacctgtatgatattgataaccaagtcttagttcaccatattgatcaagctttaagagctaactacattatgttgaaagatatcgactatgtggttcaaaatggcgaagttatgattgttgattctttcactggacgtgtaatggaaggccgtcgttattctgatggacttcaccaggctattgaagcaaaagaaggggttaagattcaagaagagtctaaaactcaagcaaccattacttaccagaacttctttagaatgtataaaaagctggcaggtatgacaggtacagcgaagacggaagaagaagaatttcgtgaaatctataacatggaagtaatcactattccaactaaccgtccaattgctcgtaaagacttgcctgatattttatatccaaccttagattctaaatttgaagctgtagtaaaagaaattaaggagcgccacgccaaaggacaaccggtattggttggtactgttgctattgaaagttctgaacgtttaagccaaatgcttaaccaagcaggtattccacatgcagttttgaatgcgaaaaaccatgctaaagaagcagagatcattatgaatgccggtcaaagaggagcagttaccattgctactaacatggctggtcgtggtactgatattaaattaggacccggtgttaaagaattaggcggtttagctgttattggtactgaacgtcacgagtctcgtcgtattgataatcagcttcgtggtagatccggtcgtcaaggtgatcctggtgtaacaagattttatctttctctagaagatgatttgatgaagcgttttggtggagatcgagtaaaattattccttgatcgaatatctgataatgatgatgacaaagtcattgaatcacgtatgattactaaacaagttgaatcagctcaaaagcgtgttgaaggaaataactacgatactcgtaagcaaactttgcaatacgatgatgttatgcgtacgcaacgtgaaattatttacggggaaagaatgcaggttatttctgaagataaatcattgaaacctgttttaatgccaatgattaaacggactattgatcatcaaattgatatgtacacccaaggtgataaaaaagattggcgtaatgatcaaataagagacttcatttcctctgctattactgatgaagaaactactaaaaagcttaatatgaagcacttaagtgcggaagaacttaagaagagactttatcagattgcagaagacaattatgctgaaaaagaaaagcaacttgctgatcctgagcaaatgctagaatttgaaaaagttgttatcttgcgtgttgtagatgaacgttggactgatcatattgatgccatggatcaattacgacaatctattagtctaagaggatatggacaactaaatccgttagttgaatatcaagaatctggctatagaatgtttgaggaaatgatcagtaatatcgaatttgatgccacccgtctatttatgaaggctcaaataagacaaaacattagtcgataaaaacaaagggaggcagataatgtctctcttttttgctattattaaagtaaaaattaatattatgatgtgaggaaaataaaaatggagattagtgaaattcaagcagaattaaatgatcttagtcctaagttagagcatttcaggaggtctctttgacttcgattcattaaatgaaggtattgcgattaatgagcaaaaaatggcagaacctggtttttgggataatcaagaacaagcacaaagcttaattaatgatactaatcgaatgaaggaaaaaagtgaaaactttaagcaacttgaagcaaaattcgatgatgctcaaactgctttagaattacttaaagcagatccagatcctgaattgagtgaagaattatctgaagaaatggtgtcattatcacaaagttttcatgattatgaattatcattattattgtcagataaatatgatcaacataatgctctaatggaaattcatccaggtgctggtggtactgaagctatggattgggctgatatgcttttgaggatgtatcaacgctatgcagttagccatgatttaaaatttgaaattgaagattatgaacctggtgaagaagctggtgttaaaagtgtaagcatccggattcaaggaaaaaatgcttttggattacttaaatctgaaaatggtgttcatagattagtaagaatatctccttttgattctgctaaaagacgacatacatcttttgcttctgtagaggtaataccagagattgatcaaagcattgaggttgatattaatccagatgatttaagaattgacgtttatcgctcaagtggtgctgggggtcagcatattaataagacttctagtgcagttcgaattactcacttacctactggaattattacctcatcgcaggctcagaggtcgcaattacaaaatagagaaactgcgatgaatatgttacgggcaaagctattccagctagaagaagagaagaaaagaaagcagacagaagaacttaaaggtaatcaaaaagaaattggctttggttctcaaattcgctcttatgtttttcatccttacaatatggtaaaagatcatcgaactaattttgaaactagtgatgtaaatggtgtaatggatggaaaactagataattttatttatgcctacttacagtggctcttaagcaaaaaaaatccgaactaaagtttaaggaaaagatctatgggatttgtaactattttaatattggtattagctgcgttggtgattttaagtattttattttcaatatttaaattctttattggcttgttacctgttgctataattgttgccgtgattatttggctgctagctaagttttctggcaataaaaaagatacggatgaaactaatagccataatccattgcagccgtccactaataatcaaaagcgaaagaaagcacgagatgtttcagtcaaagatgtagaagataaagaggataacaaaaatggttgaagcagttaaagttagtgaattagtaaaagatctcccttcacttagagtggttgaaggaaaggaatatttagatcaaaaattaattaatacttctgatatttctcgtccaggtttggaattgacaggttattttgatttctatcctaaaaatagaatccaattgctaggaagaacggaaatttcttatagtgcacgtttagatcatgatttgcgtgagcgagtatttaacaaaatggcaactccagaaacgccttgcttcattgtgtcacgaggtttaccaattccttcagaaatgcttgaagcagctgagaaagaaaagatacctgttctttctagtaatatggctacaacacatttatcaagtgtcattactcaatttctagatgaaaagcttgcgcctcgaaagagtattcatggtgttttagtagaaatttacggaatgggtgtattgattattggaaattctggtgttggtaagtcagaaacagccctagacttggtaaaacgtggacaccgtttaattgctgatgatcgagttgatgtatatcaaaaagatgataagaccgtagtgggagaagctcctaagatcctaaagcatttaatggagattcgcggaattggaattattgatgtaatgaatctttttggtgctggagcggttaaggacagtactgaaattcaattgataatctgtttgcaaaattgggatccaaaagctaattatgatcgcttaggatttaatgaaaaaacgcgtgagatttttgaagtagatgtgccgcaagtaactgttccagttaaagtcggacggaatttagctattattattgaagtagccgctatgaacttcagagctaagaaaatgggttatgatgctagccaaaaatttgaacaaaatctaactgaactaatttcagataattctaaaaaagacgaaggtgacagcaggaaatgagtttagccttaaatccggtagcttttaatctaggtccgtttcaagttaagtggtacggtattttaatggctactggagttttagtagcaaccttaatggcaattaatgaaggaaagaaaaggcatattatgcctgatgacttcattgactttctcctatgggcagttccaattggttttattggggcccgaatatattatgtagtttttgaatggggctacttttctcaacatcccgatcaaataattgctatttggaacggtggtattgctatttacggtggtttgattgcgggactaattgtattattaattttttgtcatcaacgaatgctaccaccctttctaatgcttgatatcattgctccaggtgtaatggccgcccaagtaattgctcggtggggtaattttatgaatcaagaagcacatggtgctaaaacaaccttgtctttcttagaaagtctacatttgcctcattttattattcagcagatgtacattaacggttcatattatcaaccaacttatttatatgagtcgactttaaatttaattggtttgattttgattttgagtttacgtcatagaaaacatctttttaagcgtggagaaatatttttaagttatgtaatttggtattctgctgttcgcttctttgttgagggaatgagaacagatagtttatacattgctaatactattagagtttcacaagcattgagcttgattttattttttggtgcaattattctttggatttatcgtcgtaaggttgtaaaaccaaagtggtatttggctggcagcggtttaaaatacccgtataatagagattgaaagaaataattttttatagaaagtttgagtaaaaaaatggcaaagattgcagttttaggtaatggttcatggggttctgttcttggttcaatgttagctgataacggaaatgatgtagtattgtatggaaacattgacagtgttaaccaagaaattaatgaacatcatactaatactcactacatgaaaaattggaaacttaatcctaatgtacccgctactggagatttagaaaaagcattggatggtgctgaaattattttatttgttttaccaactaaagcagttcgtattgttgctaaaaatgcacgtaaaatattagataaaactggcgctactcctttattggtaactgcaactaaaggaattgaaccaggaagtaaaaaactaatttcagatattttaactgaggaagtttatccaaatgatagtgaaaaaatagtagctatttcaggccctagtcatgctgaaaatgttgctcaaaaggatttaactgcaattgcttgtgcatctactagtgaagaaaatgctaagagagtacaaaagatattttcaaataactatgtccgtttctacactaatgatgatttagtgggagttgaagtaggtggagcagtgaaaaatgttattgcaatcgctgcaggtatcctagttggtaaaggatatggtgatgatgcaaaagctgctttaatgactagaggcttagctgaaattactcgtttaggagttaaatacttcggcgcaaaaccaatgactttttcaggtctttcaggaattggtgatttaattgtaacagcaacttctcaaaattctcgtaattggcgtgcaggtaagcaaattggagaaggaaagagtcttgattatgttttagaccatatgggccaagttgttgaaggtgctacgactgttaaagctgtacatgaattagcagaagaaaagaatattgatatgccaattagtgaagctatttaccgtgttttatatgaaaatgccgatgtagatcaagaaattaagacaatgatgggaagaaatcctaagccagaaattcaactataagcaaaaagattgcaatttttatttgttcatagtaatatatacttacaaaaagtaagaatagaggcgagaatatggctgagaaaaaaaactacgatgtaattgtaattggagcaggacctggtggtttaactgctgctttatatgccgctcgagctaatttgaaagtagttattttggatcgtggtatttatggcggccaaatgaataatactgctggcattgataattatcctggctttgttgatattcaaggacctgaattaggcgaaaaaatgtatcaaacggctacaaatgctggagctgaatttgcttatggcgatgtacaaagtattatccaagatggcaataaaaagatcgttaaaactgattcaggtgaatacgaagctggtgcggtcgttattgctactggtgcagttcataagcatcttggagttcctggcgaagaagaatatgctggaaaaggcgtatcatattgtgctgtttgtgacgccgctttctttagagatgaagatgttgctgtaattggtggcggagattcagctattcaagaggggctatatttggcacagtctgctaagtcagtcactgttatccatcggcgtgatcaacttcgtgcgaaagctgaattacaaaagaaagctttcgaaaatgataagatgaagtttatctggaatgctcaaactgaagaaattgtcggagatggcaataaagtaactggtgtgaaatataaggataaagaaactggtgaagaaaaagaaattaaagtagctggtgtatttatttatgttggtattcaaccacaaacagatgcttttagagatttaggcattactgatgaccaaggttggatcctaacggatgatcatatgcgtactaaagttgatggggtctttgctttgggtgatgttcgagcaaaagaacttcgtcaaattgcaactgctgtcggtgaaggaagtattgctggtcaagaagtatataactattaccaaggtttgagcgaaaagtaaattatccaaattaaaagctgtctatcatgagttggtagacagcttttgttgtacgtgaaattaaaaatattattttgctttattctttacttatcttcatagccctttgggtgactcttgtgccagttccaagcagttgcgataacgtcatcaacattttcatgctttggcttccagcctagaactttacgtgccttacttgaatcggcaactaatgagtcaggatctccgcctcttcttggtccaatagtgtaagggatgtcaatgctagtaactttcttagcagcttcaagaatttctaagttagagtatccttgagcagtacctaagttaaagacatcagacttgttagtttccattacgtgcttaagagctaagatatgggcgtcaattaagtcttcaacttgaacgtagtcacggacattagtaccgtctttagtgtcatagtcgtcaccaaaaatagtaaagttgccatcaccagaaatagcactctttaagatatttggaattaggtgagtttcaggaccgtgatcttcaccaattgagccgtcgcttgaagcaccagcaacattaaagtagcgaagagcgatagacttaatgccgtcagccttgtcagcccagtgcataatcttttccatcatcatcttggtttcgccataaggattaattggatcaagtggtgtatcttcagtaatcggtaaagtctttggaataccataagtagcagcggatgaagaaaatactaggtatttaactttagcgtcatccatggcttgaagaagagaaatcatacctgagacattgttgtcgtaatatttcaaaggtttcttaactgattcaggaactaatgagtaagcggcaaagtgcataacagcatcaatgttttcgtcccgtaagatcttgcttactaaattagtatcttcgatgtcgccttgataaaatttagctctcttgtcaacagcctttctatggccagtgtagagagaatcaaggacaacaacatcgtttccctcttcaattaattttctaacagcatgagagccgatataaccggcaccaccaataactaatactttcatatttataatactccttctaaatttattatttttaacttaatttgaatgaaaattcaaaatttttacttgaatctattctatatttttcttcaacatctgtcccccaactgtctattccccctacaccgcgtacttttccagcaattactaaaactgttctgcgtgctagtggaagttcttcaatgtgtgtggcattttctaattcttcagcggtataggggaggcaactaaagttaagtggtttatcagttttattaatttctagttgaaaatcatttgtatcacgatctgcattattcaggctagtatttctagtgataattaatttatctgtgtccatatgcatgccattttcttgtggaaccaaatattttgtgacaggtaaaccttttacgtgaaatactcctttttttgcccctgctttacgatcaggatatgtttcagaagaaagtccataatattcaaatccagttgccatcgtaggcatgataaaacgcattcctaggactggaagagatggcaatccttcttttcccatgtaacgcattttaatagttgcgtgtccactggaatcaataacataggtaatcgtgcatatagttgccggcgtagtagtagttttataatcaaaactaatttttacgagatttgcatattcatggttagaaaattgattattgaatggagcgataggtagaggatcaaatttttgatcatcaactgttagatgaattttactacattggctgaacatatccgctcctaaccattgagcagccttaacgctaaagccattaccgcgatcgttatcggttgtggcacgccaaaatgttggagtagggatacgatagagccattctttattattgatttttagggattcaagtccgcctttttcataactaaaaatatattgaaattttttagtttgtactcctaacgctgcatctccgtaaataatgtggagtttatttgtgtaatccataataatatttaacctcctgcattgctggtttttcagttcgatcagcaaacattagaccatccccagaaaactcataatctgagtgtcgatcatcaaagtcaccaccgtatctgagtacttttttaccgcttattggatcataggttaaaagagcttgatcaataaagtcccaaataaatccgcctaaatattgtggatattcatcaattaatttaatgtaagatttcattccaccatctgaattgcccatatcatgcatatattcgcattcaagaaatggctttgaaggattattttttaaatatttttcagcttctttaggtgggagatacatgtaactttctaaatcagatattttattttttaagtctggtgtatgaaccacaccttcataatgcgtaaggcgtgtatcatcgtgcgatttatagaattgattcattgctattaaattttcaccagcatatgattcattacctagcgaccaaaagagaatagaagtatgattctttaaagtttcataattacttctggcacgatcaataactacattacgccattctgctaaagatcctggaacattatacgaaggctcaacttttcccattttttgccatgttccgtgagattctaaattattctctgccataacgtagataccattttgatcacataagtaataccacggaatttgattaggataatggcaagtacgtaccgcattgatattgtttcttttaaaggtctgaatatcggccttcatatcctgtttagtaatggtacgtccgctattcatattccattcgtgtcggttgaccccatttataattagtctctttccattgagtaatacaactttatcgtcagttattttaatttctcgaaatccaaatttataagaatctaactcaattagatttttatttgaatcgtggacttcaataaataactgatataaataagggtgatggttatcccaaagatgaatgtttttcagtaatttattttcgattgtaattgttgaagttagattatgttcttcatccagtaaagtttgcccattgatatcttttatttttaaacgtacatatccatcttttgtaccagtaaaggataatttggcattgaaaattccatcatggtagtcatttgtaattgttggttttaatgcaagatccattaaatgtgtttctggaaaagcaagtagctttactgagcggaaaattccagaaaatctaaacatatcctgatcctctaaaaaagaggcagtactgtgtttgaatacttgtacagctaaaatattgttcttttctttaaggtagggggtaagatcaaattcagatggagtaaaactatcttcaccatatccaataaaatgaccatttagccaaacaaacattgctcgttctactccttcaaagaaaacatgaacgtgctttccttgaaaagaattatctaaatcaaaatgtttaatgtaagaaccgaccgtattatcttctcctccactgaatgaacgatctgttttctgtcctagcgaataagctggtctgcgaaaaatttttccctcccaaggatagagggtatttatatattgattttgtgcataattatttaattcaatttcacttggaacaggaatgaaatcaaaatctgaagcatcaaaattagttttgtaaaaatcaagtggtctagtttggggattattagaaaatttaaattgccattttccatctagactttgaataaaactgctacgtttttgttcccattcttcataatttttgaaatataaatgatcactgtgcgctgcaatttgattaacgcggaaagtttctggatcatctagccatcgaatatttgctttcatggttctacctgatttctaagaatattatattgaagacgcttttattatatcacttaaataaataatttactcaaaaatagtaaattatttacaaatgatatttatgttttattgattagttttgaaaatgatcttctgaactgataatgttatttatagaaaaaatagaacttttgtttaaacagagtaattaaattatagaaagaattaattatgacaactataaaaaaaatagcagaagaatctggttattctccagctactgtatctcgtttgttaaataatgatcctaacttatccattacagctgatacaaaaaataaaattttagagattgctaataagttaggttactggaaagatcatcaagaaaagaaaattcgtcctacgattgcactgttgtatcgtgttaatcatgaagagcaattacaagatgaatattttacttcgttaaagaatgctttaatttcaacagttgaaaaagaagcccttcaaatgaaaaccttttatgaaatagatgatttaataaaaaatgcttctttatttcaaggatttattgggataggggctgcaccaattgaaaataaaaaattaaagcagttgcataagatattgcctaatggagtttttgttgatacaaatcctgctcctgaattatttgattctattcgcccaaatcttgaacttacggttaaaaatgcgatcgatctgttcttcaaaaaaggatatgaaaaaattggatttattggtggagtcggaccaaagcatgacggaattcaagaaattgatcggcgagctagtgcttttgctgagtacttgaaagctagaggaaaaaataataattatatgtttgttgaggggccttttagtgttgaaaatggttatcaattaggtaaaaaggttacggcaaaatgtaaaaataagtttccgcaagcatttttaattgcttctgatacgctagcagtgggcgttttacaagcatttaatgaagaagggattaatattccaaaagaaacagcgatattaagtattaacaatagcaatgttgttaaatatgtttctccgcctttgtcgtcttataatattgaccagcaagaaatgattgatatggcattaagtatgctgattaatttaattattaaacctgatcgagctcatattgatgtaaatatgaacacaaaattagttatccgtaaaagttttattcctaaggaagataaataatttaataaataaaaataattttttcatagaaaaataaaaaaggaatgctgatagagacattcttttttatttttatatttagtaaattatttagtaaatcaaagccatttctttacgaaaaatataaatgcgagtattatatcaatgtaagcgattgcgcggtttgcgatgaggaggaaatttttatgaaatctcatggaaagtcaggaaagcaaattctttcctacgcgtcattttgtttgggtaacttaggtcattcagctttctatggtgtaatgagcacatactttgttatttttatcaccagtagtatgtttagtggaatgcaggcatctattgcagataagctgattggattaattactggtttaatggttgtcatcaggatagctgaattagtaattgatcctattttaggaaatatagtcgataatactaaaacaaagtggggaaagtttaaaccttggattttagtgggtacactagtaagtgcactacttttattggtattgtttactggaatttttggtttggctcaaaaaagttggctcttatttgctgtattatttatcttaatttatatcggttttgatattttttattcattatctgatgtttcttattggggaatggtgccagctttaagtgaagattcacatgcacgtggaatttatacatcattgggtgctttttcaggaacaattggctggaacggattaacaattatcgtagtaccgattgtgaccagtgttacttatatggtaactggtaagcacgaagaaggagcagctggctggttagcttttgcagcagtaatttccgctctcgccattgtctgcgctttaattgtttgctttggtactaaggaaaagcacaatattattagaaattctgcgaagcagaagacaagtttgaagcaagtttttggagcaatatttcataatgatcaaatcttatggccaagtcttgcttacctcttatattcattagcttatattattactaatggtgttttgttttatatgtataaatttgtaattggtaagcctaacgaattctgggtagtaggtgttatcgcaactattattggcttttgtatcagtccaagttttcccattttaaataaatatattccaagaaaatggttatttgttgctggtcaaacttgtatggttttagcttacgttctcttcatttttggacgtaataatgtaatcctaatggatttgggattagttttactaaatatcaatttcgctcagttggtaactgtattgactttgactgatgctattgaatatggtcagcttaagaatgggcaaagaaatgaagcagttgtcttagctgttcgtccaatgattgataaatttactggggcagtttctaatgctttagttagttatgttgcaattgcggctggaatgactggaacagctactgctgctgatatgacggctcatgatattaatactttcaatattattgccttatatattccattaattttagctgttttgtcaatcattgtttttctgacaaaagtaacattatcagaaaagaaacatgcggccgttgttgaagaattaaaagataaattggcggagggcaagattgaaaatgataaagaagaacctgatgcgagtgttacaaatgaaattgtttatgcaccagcggatggtaaattaatgaatttaagcgaagttattgatgagaataataagccatttccaggtaaaggatttgctatcaagccaagtagaggaaggatctatgccccatttaatggaaaaattaaatttacctttgttactaaacatgctttcgaaattgtttctgatgaagggttacaagtagtggtacatgttggtttaggaacggttaacttacgtggaaaaggttttaagacttactatgatgatggccaaaatgtgagaaaaggagatttattacttgaatttgatcgagaccttgctcttgaaaatggttatcaagacacagtaattgttttttatacacaaccacgaaaaattgtaaaaaccagtgaagttgaaactggtaagactgttaagcatggagaagaagttgtaagcgtggaatttagagaagcactaaagaattcagaaaaaacaatgggattacaagcagaataaaggagaaaaatatgacacaattatcacgatttttatatggtggagattataatcctgagcaatggccagaagatacttgggcaaatgatatacaagtttttaaacaagcacatttaaactcagctactattaatgttttttcttgggctttactagagcaaagagaaggagaatatgatttttcaaaattagacaaaatagttaaagaattatctgatgctaattttgatatcgtccttgcaactgcaactgcagctatgcccgcttggatgtttaaaaaatatcctgatgtggcacgagtagattatcagggaagacgacatgtttttgggcaaagacataatttttgctctaatagtaaaaactatcaagttcttgctagtaaattagttaaaaaaatagtaagccgatattataaaaattctcatattaaagtttggcatgttaataatgagtatgggggcaattgctactgtgacaattgtcaaaatgcttttagagactggctaaaatataaatataaaaatttagaaactttaaataaagcatggaatatgaatgtgtggggtcataggatttatgattgggatgaaatagtagttccaaatgaattaggagatgcctggggagcagaaggcactgaaactattgtttctgcattatcgcttgattatttgcgttttcaatctgagagcttattgaaactttttaagatggagaaagctattataaagaaatatgatccagtggctttagtaacaactaattttcatgctttacctaataaattacttgactatcaaaaatgggcaaaagaacaagacattatttcttatgatagttatccaagttataacatgccaacttatcagtcagcatttttatatgatttgatgcgttcgttaaaacatcaaccctttatgctgatggaatcgacacctgctcaagtaaattggcaaccatatagtccattgaagagaccgggacaaatggcagctacagaattgcaagcagttgctcatggagcagatacagttcaatttttccaattaaaacaagccattggcggatcggaaaaattccatagtgcagtaatttcacattctcaaagaactgatactagagtatttaaggaagtaacagaactaggagaaaaactagaaaaaactggttcgacaattttaggatcaaagacaaaggcgaaggtaggaattgtttttgactggaataacttttggtcttatgaatatattgacggaattacgcaagatcttgattatgtagaatcaattttggattattataaacaattttataagcgcaatatcccaacggatatcattagcgttgacgacgattttagtcaatatgacttagttgtagctccagttttatatatgataaaaagcggtttagcagaaaaaattgatcaatatgtaaaaaagggtggtaattttgttgctagctatttatctggcatagtaaacgaaaatgatagcgtgtaccttgggggataccctggtcctttaaaagatgttttaggtatctgggttgaggaaagcgatgcagtaattccaggacaaaaaattactgtttccttagatagtaacaattatcaagctaacttaatttgtgatttgttgcatttagaaggtgcacatgctttaggaaactataatagtgaattttataaagaaacaccagcagttagtgagaaccaatggggtaaaggtactagctggtatattggaacgcaattagatgaagcgggattaagtaaaatatttgatcatcttatttcaattgtgaatataaaatctttaatagagactaaaacagatttagaaataactaaaagagttacaaaaagcggaaaagaattatacttcgtcttaaatatgagtaatgatacaaaagatttgccgtctgaatttgatgcatataagaatttatttacggataaaagtgcaaataaaaagatgaaggcatgggaagttcaattgttgagtaagctttagaaataagttaggtataaaggattaatattaactttataccctttttatgaaatttaataaatttatttactaaatagttttataattaattatgaaaacgattacaaaaaattaagaggtaaaaattatgaataaagatgaattacttaaagactatcaagaagtatttagtgaaagtggaaaagatgttttcttctcacctggtcgaattaatgtgattggagagcatactgactataatggaggacatgtttttccagcagcaattagtttaggtgtttacggcgtttatggaccaagagatgacaaaaaggttcgtctttattcaggtaatgtagatggtgaaattgtcgaatttgatttagatgatgatttagtagaaaaagataaacgcttttggactaattattttaaaggaatgattacttatttacgtcaacgagaagacggcgaaaaaattaaccatggttttaacctttatattaaggctgacttaccatcaggatctggtctatcttcaagtgcagcaattgaaatgctaatggggatgattttaaaagatgaatttgatttagatgttgatcgtccaactttggcaagactaggacaaaaaactgaaaatgaattcgttggcctaaattcaggaatcatggatcaatttgcttgcatcatgggtaaaaaagatagtgctattttccttgattgtaacacgatggaatatgaatataagccacttaaactgggcgattatgaaattattattatgtctactaataaagagcatactttagcagattctgcttataacgatcgtgttagtaaatgtcacaaggccttagaaaaactacaaactaagcttggtattaaagcactaggtgaactagacgataatacttttgatgaatattcatacctaattaacgatgaaacggaattaaaacgtgctcgtcatgcagttagtgaaaacggaagaacaatcagagcaactaaggccatggaagataacgatcttgaaaaattgggtcgattgattgatgcatctcatatctcccttcattatgactatgaagtaacgggtaaggaacttgatactttagcagaagcagcttggaaacaagacggagttttaggagccagaatgattggtggcggttttggcggtagcgcaattgcaattgtgaagaagaacgaagctgaaaactttaagaaaaatgttggcaagatttatcgagatgcaattggttatgacgcaagcttctatgatgcagaaattgtagatggaactaagagaatttaatattaagaggctacagaaatgaaaattattgagaaatttgcagatgaagttattgaaagtggagcctatcaagaattagatcgtgtatacataattaacaagatcaaagccttagttggtgatgaagaccaagaatgtgatgaaaaacaaacatcagtacaccaacttgtgcaaatggctgttgatcgtaaaattattccagatgacaatacttcacgcgaagtcttgaatgatgagttatatgatttgaagactccaacaccttcaaaagtaaatgaaattttctggcaaaagatgcaaaagtcagctattacagcaactgattggttttataagctttgtgttgataataattatgtcaaaaaagaagcaattgctaaaaatattgttttttcaggcaggagttctaagaatcatgaattagaaattactattaatctgtcaaagcctgaaaaagatcctaaagccattgctgccgcagctcacaatactggtaataaatatcctcaatgtgctctatgcttagaaaatgaaggttatgttggcggatatggaaaaaatgccagaagtaatttacgtgtaattcgaatgactatcggtggtcatccatggggctttcaatattcgccatatgcttactttaatgaacattgtattttcttagatcaaaagcatattccaatgattattaatcaacaaaccttaattaatttgattgatattgaaaaacagctcccagaatattttgttggttcaaatgcagatttgccaattgtcggcggttcaatgctggctcatgaacactatcaaggcggacgtcacgtctttccaatgatgaaggcaaagattaagaaagaagttatttttgataaatatccggatgttaaggtaggaatagttgattggccaatgagtgatttgcggctaattagtaaaaattcactagctttaattagtctaggtagtaagattattgatttttgggatcgttatagtgatcaagatcgtcaaattactgcttttgatggtaagactagacatcatacggttactccgattatgcatcgtgatggagaaaaatttgttctagatttagttcttcgcgataacaatactagcgataagtatccattaggaatttttcacccacattctgagctttggcatattaagaaagaaaacattggtttaatcgaagttatgggaagagcaattttgcctggaagacttaagaaagaattagaagaagtaaagaaatatttactcgatgaaaataatgagatagctgaaagccatcttgcttgggctcaagaaattaaagctaaccatcaaattactagcgaaaatgtagatagcatccttcaacaagctctagttgaagtgtttgatcaagttcttgagtgtgccggtgtcttcaagaataatgaaaatggagaagttggttggcaaaagtttaccgaggctttagttagcgaggtagatagagaaaatgaaaacaagttttagaaagtatagtcgtaaaaatggtcaggacttatgtgaaattagtcttgaaaataatcaaggaatgaaggttaagattcttaattatggagcaactttagaaaaagttctacttgatggcgaagatatgattttgtcattaaatagtccagaagattattcaaaagaaagaaattttctgggtggaaccgttggcagaatttgtggacgcgttcggctaggtcaatggaaacatggcaaccaaatatatcaacttcctcaaaatgatggagaaaaccacattcatggtggtattggaactgatatgaaaatctggaactttaaattaaaaaattcagaacaagagtctcgagttgatctctttctttttgatccagatggagataatggctatcccggcaacatgaagttacatgccacttataagcttgataatgaaaataacttgtcatacaaattagaagctgttagtgatcagttaacaatttttaatccggctaatcatacatatttcaacttaggtgaaagagctaccgacttaaaactccaacttgcagcggattactatttgccagtaggtacggatggattgccaaatcaaggaatgaaaaatgtagagaatacagtgtttgattttagacaaggtaagaagatatctgctgctttagatagtgatgatagtcaaattaacttgcgtaacggtctagatcatccttttattttgaatgggatgcagcctgcagcagtgttgtcatctaataaacacaaaatgattatgaccactaatgcaccagcaattgttacttatacagctaaccattttaatcatactggtgtagcaaacaatattggacagtacgatggaattactttagaagcacaatatccaccagcagaaggtatagagttaggagaaattactttactcccttttgaaaagtttgagcgtaagattaactggaactttagttaattacatacaaacagtagtaaattttataaaagcgtttaatatcttttgcaaacagaataatttaattgttaattatgatagcaatttcacaatgagttgcgttaaaatagcagatgaaaccataaaatttacgtaaagaggaaattatgaacgcaaaagaaatttatagtcaatggactaatgcaaataatttacctgattatttaaaagatcaattaaatgatctaggtaaagatgaaaagtggattgaagatgctttcggacaagatattaattttggtactgccgggatgagaggtagacttgaacctggtacaaacagaattaatttgtttactgtgggaagagtaaccgaaggtcttgcaagactaattgatgaaaatggtgaagaagctaagaaacgtggcgttgcaatttcttttgattcacgttatcactcaagagaattcgccgaacacgcagctcgtattttaggtgcacatggaattcatgtatacttatttgatgatttgagaccaactcctgaattatcatttgctgtccgtcacttaaatacctttgctggaattaacatcactgcttcacataatgctaaacaatataatggttataaggtttatggtgaagacggtgctcagatggcgccagaaaatgcagatcgcttgtttgcttatgctcaaaaagttgatgacatttttagcgttaaagctgctcccgtggaagaactacgggctaatggcacgctacagttgattggtgaagatgtagatgaagcatacttagctcgtttaaaggatgttactgttgatcctgaaatggttaaggctaatgctgataaattaaagattatctatactccattacatggtactggaaagatgctatatgatcgtgccttcagacaaggtggttttgataatgtgattccagttccaagtcaatctatcattgatccagaattccctacaactatcaagcctaacccagaataccgtgatgtatttgaaccaggatttaagcttgctaatgaagttgatgcaaatgttattattgcaacggacccagatgctgatagaatgggtgctgctgttagaaaatcagatggcgatttccaagttttaactggtaatcaaattgctacattaatggcctattacttattagttcatatgaaggaaaacggaactctttcatccgactatgaattagtaacttcagtagtttcaagtgcacttccatttaagattgctgatgattttggtattaaaactaagcatgtgctaactggattcaagtacattggtgaagaagttgaccggatgaataaagaagatgacggtaaattcctgatgggatttgaagaaagttacggttacttatttaaaccattcgctagagataaggatgctatgcaaggtgcattaatgtttgcagaagtagcaagttactatgcatctaaaggaatgactgtttttgatggattacaagagatctggcaaaaatatggtgtagcttacgaaattactaaggctatcgaaatgcctggtattggtggtcaaaagaagatggctgaattaatgagtaagttacgtaaagaacatttaactgaaattaatgatgcaaaggttgttaagattcaagactttgaaacccaagaaactattgaagatggaaagaaaactccattaactggtttccctaagtctaacgttttgaagtacttcttagatgatgaaacttgggttgctcttcgtccatcaggaactgaacctgtaatcaaggcttatgttggagtaaataagaaagatattgaaactgcagaaaaagctgcagaagagtatcaagatgcattagctaatatattaaagtaatgcaaaaacagtgcgaaaatacgttcgctgtagtaaaatgaatacgttatatagaagttgggctattttagtccaactttttttgcggaggatgaaaaatgattagacgacaaaaaaataaaaaatttgaacttgtctctaaatttcaaccagcaggagatcaagagcaagcaattaaaaagttgactgatggatttgagcaaggagaaaaagcacaaatcctagaaggtgctactggaaccggtaagacttttactatggcaaatgtaatagctaagctaaataagccaactttagtaatttctcataataaaactttggttggtcaactgtatggtgaatttaaagaatttttccctaagaatgccgttgattattttgtgtcttattacgattactatcaaccagaagcttatgtaccacaatctgatacttatattgagaaagattcatcaattaatgatgaaattgatcaattacggcataagaccactagtgatttaatgtcgagaaatgatgtaattgttgtggcgtcagtatcatgtatttatggtttaggtgatccgagagagtatgcggctagtgtagtctctttatctgaaggccaagagattagccgagatgtgctattacgagatttagtaaatattcaatatgatcgtaatgatattgattttcagcgtggacgctttagagtacgcggtgatgtagtagaaattttcccagcaggatattctgatcatgcatttagagttgaattttttggtgatgagattgaccgaattgttgaagtggattctttgaccggtgaagtaattggagagcgagaacaagtttctattttcccagcaactcactttgttactaatgaacaaattatggaaagagctttggcctcaattaaagatgaaatgaatattcaggtgaaaaagttcgaaggggaaggaaaacttttagaagctcaacgaattaaacaaagaaccacgtatgatatggaaatgatgagtgaagttggctacactaatggaattgaaaactattctagacacatggaaggacgaaaagctggccaaccaccacatactttgttagatttcttccccgatgacttcttaattttaattgatgaatcacatgccaccatgccagaattaaaggcaatgtataatggagatagggcacgtaagcaaaccttaattgactatggttttagacttccatctgcgttagataaccgacctttaaaattagaagaatttgaaaaacatgtaaatcagatcatgtacgtatcagcaactccaggtgattatgaacttaatcaaaccgatcacaaggttgagcaaattattcgtcctactggattacttgatcctgaaattgaggttagaccaattaagggacaaatcgatgatttagttggtgaagttaataagcgtattgaacgtaatgagcgtgtttttgttacaactttaactaagaaaatggccgaagacttaaccgactatttaaaggatttagggataaaagtgcgatatctacattctgatatcaaaactttagagcgtcttgaaattattagagacttaagactaggaaaatttgatgtactgatagggattaatcttttgagagaaggtattgatgtacctgaagtctctctagttgcaattctggatgctgataaagaaggttttctccgttctaccagacctttagttcaaacaattggtcgggctgctagaaattcaaatggtaaggtaattatgtatgctgattcgattactgattcaatgcgtgaagcaattgatgctacggagagaagacgtagtctacaaatgaagttcaacaaagagcatggcattactcctaaaactatcgttaaaccaattagagatgtaatttctatcactaaagatagtgaggataaagagaataaggaaagttttgctgacttaaactttgatgaattgactaagaaacaaaaacaaaatatgattaagactctaactgcacaaatgcaggaagctgctaagaaactggactttgaagaagcagctaacttgcgtgatgcaattatggacttaaaaaaacaggtgcatgaaaagaaaaagtagaggaggatagttaaatggcaaatgataagattgttattcacggagcacgggaacataatttaaaagatataagtttatcaattccaaaagataaattagtggttattactggtttatcaggttctggaaaaagttcactggcatttgataccttatacgctgaaggtagaagacgatatgtagaatcgttatcaagctatgctagacaatttttaggacaaatggataaagctgatgttgactcaattgatggattaaatcccgcaatctcaattgatcaaaagacaacatcacataatccgcgctcaacagttggaactgtaacagaaattaacgattatttacgtttattatgggctcgtgtaggtcatccaatttgtccaaatgatggaactttaattgaaagacaaagtgtagatcaaatggtagatcgagtaatggatttgcctgaaagaagtagaattcaaattttagctccagttatccgttctaaaagaggagaacataaagaggtatttaagcgaattcagcgtgcggggtatgtacgggtaattgtagatggcgaaatgcatgaaattactgatgagtttgagctagataaaaacaagcgacacagtattgatattgttgtggatcgtctaattgttaaagaaaatattcgtagtcggttatttgattcggtagaagcagcccttcgtttagccgatggttacatgtatgttgatgtgattaagggagaacgcattaacttttcagaatactatgcttgtccgatttgtggttttactgttggtgaaatggaaccgcgtttattttcattcaatgcgccttttggagcttgtcctgattgtgatggactaggtatgaagctttcagtagatgaagatttagtaattcctgataaggataagtcattaggtgaaggagctttagttccttgggctaactctaagtactatacagcgatgttagaacaagcctgtacagccttgaaaatccccttagataaaccatataaaaaattaactaaaagacaaaaggatttaattttaaatggatctaagggaaagaaaataaaattccatctcgaaggagactttggtgtaaacgatacagttcaagaatttgaaggaattttaaataatatcaatcgtcgataccaccatccaatgtctaaattcatgcgtgatgcaatgggtaagtatatgactgaactgacttgttcaacttgtcatggtaaaagattgaatgaaaaggctttagccgtgaaagtaaatggtaaagatattgctgaagcatctgatctttcgattgcaaaagcattagaatttttcaattcagttaaattaagtgaacaagaagaaatgattgctaagccaattttgaaagaagtacgggatcgtttgacatttttaattaatgttggattagactatcttactttatctcgttctgctggcactctatctggtggagaagcgcaaagaattagactagcaactcaaattggttctaacttgtcaggcgttatgtatattctagatgaaccatcaattggtcttcatcagcgtgacaatgatcgtcttatttcttcccttaagaaaatgagagatcttggaaattctctaattgtagtagaacatgatgatgaaaccatgaagcaagccgattacttagttgatatgggaccgggagccggagtatacggcggaaaagtgatggctgcaggtacgcctgaagaagtaatgaagaatccccattctttaactggggagtacttatcaggtaaaaagattgttccagttccattagagcgaagaaaaggtaacggtaagaaaataactattactggtgcaaaagaaaataatttaaaaaatatctctgtcgattttcctttaggtaaattagttgttgtaaccggagtatcaggttccggaaaatcaacattagttaacttaattttgaaacgtgctctggcacagaagttaaataataactctgcaaagcccggtaagtatgaatcaattaagggatataaaaatatcgaaaaaattatagatattgatcaaagtcctattggacgaactccgcgtagtaatccagccacatatactagtgtatttgatgatattcgtactttatttgcccagactaatgaagcaaaaatgcgtggctatactaaggctaggttttcttttaacgttaagggcgggcgctgtgaagcatgtcatggagatggaattattaagatagaaatgaattttttgcctgatgtgtatgtcccttgcgaagtttgtcacggaacaagatataactcagaaaccttagaagtaacctaccgtgaaaaaaatatttctcaagttttaaacatgacaattaacgaagcatgcaaattctttgaaaatattcctaaaattcatcgtaagttacaaacaattgttgatgtaggattaggatatgtaaagttaggacaatcagcaactactttgtctggtggggaagcacaaagaatgaagttggcttctgaattacaaaaactttctactgggaataacttctatatcttggatgaacctacaacagggttgcacactgatgacattaaacgtctgttagaggtattgcagcgcttagttgatgaaggaaatacagttttaattattgaacataacttagacgtcattaaaaatgcagattggctaatagatttggggcccgaaggaggagatggcggtggacaagttgtggctactggtactccagaagaagttgctcaagtaaaagaaagttatactggccaatatttaaaacctgtccttgaaagagatactgagttaactaagcaaatgataaataataaaaaggagcaaggggaaagttaatggtgttttagaaaattaagtgtagaatattatctgggaggatataaaaatgaacgacatttataattctagacatcaaggctttgattggggctcatttatagcaggaattttgtttgttatagcatcgttcttgttattacgctaccctggtcgtggtttacaagcatttgtatttgtatttggtattttatcaatcttacaaggtctaatttggatttcagcatatgttaaatttcataatatttttgatttgagctgggtaacaataatttctgcaattattgatattgtaattggtgttttgttcctatgttcacgtgaaattgggggattaactttagctattttatttgctatctggttcttagctgattcgattattgggatcattttctcatggcacttacgtgaatattcaactggatactttgttctttgcttaattttaaacatcattagtttaattattgcttttgctttactatttaacccaatgttagctgctattactttagtttacttagtagcattttggttaatggtatttggaattaatgaaatttttgtttcatggatgcatagataaaataaaaagtcgtatatcgttggaagactaccaaagataacgactttttattttatttaaaaaatggaacacccggtatgttataatgtcgattaaggagggataactatggctgaacaaaagaaacaattattgattgttactggtatgagtggtgcaggtaaaactgtggccattaaagcattagaagatatgggatatttcgtggtagataatttaccaccggaattattgggaagtttctgggaattaattaataattcttcggattttagtaaggcagcagtagttgttgacttgagagtaaagagtttttataaagatttggttgatgaaatcaagtctttagaggatagtcaaaatgttcagtcaacagttttgtttttagatgcttcagatgacgtcttagtgtctcggtataaagaaacaagacgcttgcctcctttagctcatacgggtcgcttgcttgatggaattcaagaagaaagaaatattttatcaagaaccaagaatatttcaaacataattattgatacctcccatttatctaccaaggaattaaagacaaaattagtagataagtttggagataatcgaactcggacgttttcaattgaagtaatgagttttggatttaaatatggtattccaattgatgcagatattgtaatggatgtaagatttttgccaaatccattctacattccccaacttaagccatttactggtttagatcgtcgagtttttgattatgtaatgagcaagaaagaaactaaagagttttatgctaagtttttagatatgttggagacggctattccaggatatattgctgaaggaaaagaaaaattaactattgcaattgggtgtacaggtggtcagcacagaagcgtttcaattgcacgccaattagcagttgatttagctaaaaaatatcctgttgatatttctcaccgagagattagtcgttatattggacaataaaggagcggagatggcgtacggagaaaataaaattgtacgtgtcattcgtggacgtcgccctaaaattgttgttattggcggagggacaggtttacctgttattttaaatgctctaaaggagcaaaacgctgatataacagctattgttactgtggctgatgatggcggatcgtccggtgcaattagagattatattaatgtagtgccaccaggggatataagaaatgtattggtttctttatctgatttaccacaagaagaaaaagatatttttcaatatcgatttaattcatctgactcattttttgcaggtcatgcaattggaaatctaattattgctgccttagatgaaatgcagggaaatatttttgacgctgttcaatccctatctagaatgatgcgaattgatggaagaatctttcctgcttcgaatgagcctttgactttaaatgcggaatttgtcgatggaacaactgaatcaggagaaacagaaatcacatcaaaagacaagaggattaaacgtgtctgggttaccgatactgactcagatgaagaacctaaagctgtgttgccagttttagcagctattatgcaagcagacgcagtagttttaggaccgggtagtttatttacatcgattttacctaatttgatgatttctaatttaggggatgctgtaagacaaactaaagctgaagtaatttatatttgtaatattatgacccagcaaggtgaaacagatcattttacagcggctgagcatgtgcaagttattaatgaccacttaggaggccattatattaataccgctttggttaacggtgctaagattgatatgactaaatttaacccagccgattatgatgcttatcttgaaccagtacggaatgattttgccggattgagggctcaagattgtcgagtaattacagctgactttatcgatcaacatagtggattggtttttcatgatggaaaaaaagtagctgatgaaattttgaatttagcttttgaagcatattgtcgaagacagaaggaacaggactagttaatggtttcatacgcaagtgatgtaaaaaaagaacttacaagtctgccagttcatcccgaacacgctaaggcagaattagcagcttttttgcgaatgaacggagtacttagcctgcacgatcatcaatttagtttggatattacaactgaaaatccagcgattgcaaggagaatattttctcttattaagactgcttatggaattgaacctctattaattgtttctaagaagatgaaattaaagaaaaattatcagtatttagttagacttcaaaaacaagttcatgaaattctaaccgacttagaaatttttgatagtaataatggtcttattacgggaattcctgaaaagattatgtcttcggaacaaagagcaatgtcctatttaagaggagcttttttagcatctggaagtgtaaataatccagaaactagtcgctatcatttagagatttattctctttatgaagatcacaatcaagatctattaaagttaatgaacaatttcttttatttaaatgcaaaagaaactaggagacgaagtggctatatcgtctatttaaaagaagcagaaaaaattggtgattttctccatatagttggtgcagtgaacgcaatgctagcttttgaagatttaagaattatgcgtgatatgcgtaattcggtgaatcgtttagtgaattgcgatacagcaaatctaaaaaagactgcaaatgcagcagctaagcaagttgaagatattcaattgattgaagaaaaatttggtttagaaaacttacctgaaaaattgactgtgctagctcgttttaggttaacgcatccagaactttctcttaaggaagttgcagcacaagtaccagatggtccaatctcaaagtcaggggttaaccatcgttttcaaaaaattcgtgaaatagcgaagcaattaaaagaagaaaattagataaaaaaatagagctcacatcgtgagctctatttttgtctgaataaataaactagtctttcttttggtttaccaaaatttcatcgattaaaccatagtctttagcttcttcagcagacaagtaattgtcgcgttcagtatccttaaggatcttatcaagaggttgaccagtggtttcatgtaaaatttggttaagttttttacgactctttaaaatttcattagctgcaatttgaatgtcagtttgttgaccttgtgcaccacctaacggttggtgaataagaactgttgagtttggtaatgcaaaacgtttacccttagttccactagttaaaaggatggaagccatagaagcagccataccaatggcaattgtagatacgtctgatttgataaagttcattgtatccataattgctaatccagaggtaataacaccacctggagaattaatgtaaagagaaatatctttagtgttatcttgtgcatctaagaataaaagttgagcaatgatggaattagccatttggtcattaatttcaccactaagcataatgattctatcttttaataatcttgaataaatgtcgtaagcacgttcaccacgtgcagtttgttcaataactgtaggtacgagcattaattttacctcctaaacaaaattagcactctaataagtacagtgctaattaaatcacttgcttttaatcatgtcaactgatcgagcttaattttatgtagaaaaaatgaccgatatattttttatatcggccatttgtaattaatccattagtggattattaccatcttcttttttcttgattgctggtaaaatcaatcctaaagcgatcaagataattggagtaataatattaaggaaaagtgtaaatggatcaggagagtaaagtcctaaaatacaacatgcagctgttacaatgaaacaccaaattccggcagtatacgcaagaccttgattttttgtcatttgataagaagtatcaaattttgtttgatgttttctaagagcaatataagctgcaaatacccataaatagcgcattggcattgtagtagaatttaacttaactaattgtgccataacagcttgtgcatctggtagtaaagcttgagctgcaattaaaccaccggaaaggataacgaccatccaaatgccgttgatatatgctccatgtttattaactttaaggagtttcttagggatgaagtttttagcttctttactacctaataacattctaagtggagcatcgatactaataactaaggtagaaaattgtccaataacgttacaccatgaatagatatacataaacaagccaccaacatggtaatattcacccaaacgctggaatgccatataagcaccgtttgaaatatattcatttaaattattgttaacaatcttaggatcaaacatcaaagccatggcaaatgttcctaaaatagcagaaatcataaccataatagcaagagccatcattgctttcgggaagttttttgaagggtctttaactttatttacatagggagatattttttcacatccaccaacggcaaaaactagaattgaaagagaagttaaatacttaagattgaatgttggcattaaacttttccaattaaagttaattgaataatatcctgcgtgagggttaattgctggagcagcaaacatcataattataaacaaaatagacatgataaacattgatgatccagcaatagtggctaaacttttaagaacaggaattcctttactagtgacccagcagaaaaataggaaaacaactaaagtagcaagttgagtccaggccgttgggagaccatcataccatttggtatttccaaaaattccccaagccatcgctcttaagccgccggtacctttactggaaatataaacgacgtgacaagcccaataggtccatccggcataatatgcccattttgcacccatggtcgcattaacccaagatgagacaccaccatttgcatttttaaaggtagcgcctaattctccaaccattaatgcatagggaacaaaatagagtaaaaacattagaacccagctgaaaacgaccttagtaccatcgaagtaaacataaccatttacaacattgccaaagccccaaacagttgaaaatgccatcattgccagtgtaggccaaagcatttttttggcatcagactttttttcttcttcgatcataaaataacctttctgtctatgtacataattaataccgattttaattataacgaaaatgcttacaaatgataggctatttctaaataaaccgagtaattaaatgatacaaaaaaaggagccagcatacgctagttccttttatgcgccccctgagagtcgaactcagattttaagaaccggaatcttacgtgcgatccattacactaagggcacgacaaactaaaataagtatatcagaaaatgtagaaagtacaaattaattattctgaatgatatatcttgaatttaaaaaaagatattgctatactaaaaactgtcgagagagaaatgtgaattgaaatatagttaattcgcgtctctctaatatttttaagctttttgggtcgcttaccgtcatatggcggtatcgcttttgacccaatagagggagcgagcaatggactcggatttaaccttgttgcaaagcttagttcctgatgttttaaaaataattcggcaacgttttcttgttcttgaacagatttcgctgttagctccagttgggcgaagagttgttgctaaaaaattaggattaagcgagcgcaatgtgcgaactgaaactgattatttgcggcagttaggactcattaatatccagagctacggtatggaattaactgataaaggaaagagaactttaaaggaagctgctcctttaatcgatcgtttgtttaacgctagtcaaactgaaattgaattggcacaaaaattagggatcgatcgagctattattgttcctggtgacatggatcgacaagagcgcgttgttgacttaatgggtgaacaacttaactctgcgcttgatttacttttaccattaggaaaaagtattattaccgttttaggtggtactactgtggcgggagtagcccatcatctttctcctaaattaagccgctatcgggatttgttatttgttcccggaagaggagcagttggagaaagcgttgaaatccagagtaatactgttgctcagatgatggcttctgagacaggtggaaagcataaagggctatatttacctgaaaatgtttcatctgaggctttgactttattgcttcaagatacagatattgcgaatgcgatttcaaacatttataatagtgatatggtgatacatggaattggtagagcagatgtcatgtcaaaaagacgtggcttagatgtaatgactagttccaagcttcgaaatgatggagctgtggccgaatgttttgggtatttctttgaccaacaaggtagacttgtaaaacgtatcccacggatcggtcttcaattagaagacttagataaaatacctcatgtatttgcaattgctgctggggctagtaaagcttctgcaattgtagcttacatgcatcatgctcctaaacaaacgtggttaatcacggatgaaggagcctcaaacttggttttaaaggggaagtaattcccgtttaaaataaattgttacttacatatttcctaaggaggaatataggatatgacagttaaaattggtattaacggtttcggccgtattggtcgtttagcattccgtcgtattatggatttaggcgaaaagtcttcagatattgaagttgttgcaatcaacgacttgactactccagcacttttagctcacttacttaagtacgactcaactcatggtactttcaaccacgaagtttcagcaactgatgactcaatcgtagttgacggtaagaagtaccgtgtttacgctgaaccacaagcacaaaacattccttgggttaagaacgatggcgttgactttgttcttgaatgtactggtttctacactagcaaagctaagtcagaagctcaccttaaggctggtgcaaagcgtgtattaatttctgcacctgcaggttcagacttgaagaccattgtttacggcgtaaacgatgatactttgactgctgatgacaagattgtttcagctggttcatgtactactaactcattagcaccaatggttaatgctttacaaaaagaattcggcattgaagttggtactatgactactatccacgcttacacttcaactcaaatgcttttagatggtcctgtacgtggtggtaacttacgttctgcacgtgctgcagctatcaacattattcctcactcaactggtgctgctaaggctattggtcttgttgttccagaattgaacggtaagttgaacggtcacgcacaacgtgttccagttccagatggttctgtaactgaattagtttcaatcttaagcaaggatgtaactgctgacgaagttaacgaagcagttaagaagtacgaaagtccttcatttgcatacaacgaccacaacatcgtttctagcgacgttttaggtatgactgctggttcaatctttgacccaactcaaactatggtaactactgcaggtgacaagcaattagttaagactgttgcttggtacgacaacgaatactcattcacttgccaaatggttcgtactttattgaaatttgctactctttaatcattaattattaattactgattttaagtaagcagacgagagaaggcggagggaattacttcctccgccttttttcaaataatctatcggaggtaaattagtttaaatggctaaattaatcgtttcagaccttgatcttaaaggtaaaaaagttttagttcgtgttgacttcaatgttccaattaagaatggtgttattggtgacgacaaccgtattgttgctgcattaccaactattaaatacatcattgatcacggtggtaaagcaattttgcttagccacttgggtcgtgttaagtcagatgctgacaagaaagaattgtcattacgtccagtagcagaacgtttaagtgaattattagaaaagcctgtaacttttgtaccagaaaacgagggtaaagaagtagaagaagctatcgacaacatgaaggatggcgacgttgttgttcttgaaaacactagattccaagatattgacaacgactttggtaagcgtgaatctaagaacgatccaaagcttggcgaatactgggcaagtcttggtgatgtatttgtaaacgatgcatttggtactgctcacagaagtcacgcttcaaacgttggtattgcaactgctatgaagaaggctggtaagcctgcagcagctggttacttacttgaaaaggaaattaagttcttaggtgatgctgttgaaaacccagttcacccatttgtaactattcttggtggtgcaaaagtatcagataagattggtgttattgaaaacttaattcctaagtcagatcacattttaatcggtggtggtatggcttatactttcttagctgcacaaggtcacaagattggtaaatcattatttgaagctgacaaggtagaacttgctaagagcttgcttgaaaaggctggcgacaagatcgttcttccagttgataacgttgctgctactgaattctcaaatgatgctcctcacgaaattgttggtgatgatattcctgacaacgaaatgggtcttgacatcggtcctaagactgttgaaaaattcagagacatcttaaaggatgctaagactgttgtatggaacggacctatgggtgcattcgaaatgccaaattacgcagaaggtactttggaagttggtcgtgcattagctgacttaaaggatgccgtaactattattggtggtggtgactcaactgctgctgctaagcaattaggaatcgctcctaagatcagccacatttctactggtggtggtgcttcacttaactaccttgaaggtaaagaattaccaggaatcgcttgtgtttctgacaagtaaaattaggaggaatttttaatgcgtacaccaattattgctggtaactggaaattacacatgaaccctgaacaaaccattgaatttgttaatgcagttaagggtaagttgccagatccaagtaaagttgaatcagttattgctgcacctgcagttgatctttatgttttaaagaagactgctgaaggctcaaacttacatactggtgcagaaaatgcatactttgaagttgaaggtgcctttactggtgaaacttcacctaaagttttgaatgaaatgggtattgactactgtattattggtcactcagaacgtcgtggttacttccacgaaactgatgaagacattaacaagaaagctaaggctttatttgctaatggcgtaactccaatcatttgctgtggtgaatctcttgaaactcgtgaagctaacaagcaagatgaatgggtagtagctcaaattaaagctgctttagatggcttaactgcagaacaagtttctaaacttgttattgcttacgaaccaatttgggctatcggtactggtaagactgcttctgctgatcaagctgaagaaatgtgcaagactattcgtgaaactgtaaaagacttgtacaatgaagaaactgctgaaaacgttcgtatccaatacggtggttcagtaaaaccagctaacgtaaaagaattaatgtctaagcctgacattgatggtggtttagttggtggtgcttctcttgatccagaatcattcttagcattggtaaactaccaagattaattaacaatttatttaaacggaattagaagaaaaaaggagaatctccatgtctgttattactgatattcacgcacgtgaagttcttgactctcgtggtaatccaactgttgaagctgaagtttacactgaattaggtggctttggtcgtgctatcgtaccatctggtgcttctactggtgaacatgaagcagtagaattacgtgatggtgacaagtctcgttttcttggtcaaggtgttttaactgctgttgaaaacgttaatggtgaaattgcaaaagctgttattggcttagatgtaactgatcaacgtttaattgaccaaactatgattgaccttgacggtactccaaacaagggtcgtttaggtgctaacgctatgttggctgtttcattagcaagtgcacgtgctgcagctgatgaattaggtttacctttatacgaatacttaggtggaccaaacgctcatgttttaccaactccaatgatgaatgttattaacggtggtaagcacgccgataacaacgttgatatccaagaattcatgattatgccagttggtgctaagtctcttcatgaagctgttcgtatgggtgcagaaactttccatactttgaagagcttgcttcaagaacgtggtgaatcaactgctgtaggtgacgaaggtggttttgcaccaaacttgaagaacaacgaagaaccatttgaaattttagttgaagctattcaacgtgctggctacaagcctggtcaagatatttctattgcatttgactgtgcagcttctgaattctacaacaaggatactaagaagtatgtgactgttgctgacggccgtgaatacactgctgaagaatggacttcacttatggaagacatcgttgacaaatacccagttatttccattgaagatcctttggacgaaaacgattgggaaggttggaaagtcttcactgaacgtttaggtgataaggtacaaatcgttggtgacgatttattcgtaactaacactaactaccttgaaaagggtattaagatgggtgttgctaactcaatcttaattaagcttaaccaaatcggtactttgactgaaacttttgaagctattgaaatggctaaggaagcaggctacactgctgttgtttctcaccgttctggtgaaactgaagatactacaattgctgatttagttgttgcaactaatgctggtcaaattaagactggttcaatgtcaagaactgatcgaattgctaagtacaaccaattaatgagaattgaagaagctttgggttcaactgctcaatacaaaggaattcacagtttctacaacttacacaaacaattttaattaatagttgaaataaaagaaaaagggacgttgctttaggtgactccctttttcttttagcattcattggctaaatatggtaaaatcagtacagtaagaaatttaggtaatggaggcagcgctttgtataatatcgtcatgacgctactcatcattgttagctttttaattattattgctacgttgatgcagccgcaaaagcaacaagatgccttaaacgcattgtccggcggtgcagtatttagcggccagacaaagaagcgtggatttgaagcattaatggaaaggattaccgctgtattattggttctcttttttgctcttgctttgatcttggcagtactttcatccaagtaaaaaaagccttccggtcacaggagggcttttttaatttcttttaacttaacttattttataaagaaattgaggcaatttatataatgacacagaatgaacgagttttagctgatgtttatgaaacatttagacataatcctcaagaacaatatgatgtggatcaacttgaaaatgatcttagtcgtagccaaagattgaattttcctgatttggttaaagctttaacttttttagagcatagtaaaaagattgtaactgatggtcagggaaagtaccagttgaatcaattaaacactgttgctgaaggtacctttaaggcaaatgataaaggatttggttttgtcagatttgatgatgaaagcatggaagatgcctttattgataaacataatactaaatttgctattgatggggaccgcgttaaggtaaaaattattgctggtgctaatccatggaatggcaaaggtccagaaggtaaaattgaagaaattactgaacgtggtgtagaaactttagttggagaatttcatccatactctgatgaagtagtgaaatcaagtggattttacggttatgttgttagtgaaaatagaaaattaaagaaatataaaattaatatcactgataatggtgttaagccacaaatgggtgatatggttaaaatttctattactaaatatcctgatgaagatcaaccagatgaaatgcagggtgtagcacttctcacaatcggtaataagaatgatcctggtgttgatatcatgtcaattgttgttgataatgatattcggactgattggcctgaagaagcaatggatcaagcaaataacattcctgatcatgtaactgaagaagaaaaaagtaaacgggttgatattaccgatcaaccagctgtaacaattgacggtgacgattctaaagactttgatgatgcagtcgtagtttggaaactccctaatggtaactatcacttaggagtacatatagctgatgtatctcattatgtaaaagaaggcacaccgctagataaagaagcttttgctcgtggtaacagtacatatttagttgatcgtgttatcccaatgcttccatttagattgtcaaatggtatttgctctcttaatgaaggtgtagaacgtttagttctatcatgtgatatggaaattactccagaaggtaaacgtgttggatatagaatttatccatcagttatgaagtcacatggacgtttaacttacaataatgttaataaagttcttgatccaaataatcatgaaaagttagagcaaaagtatgcagatgcagcctcaatgcttcatgaaatggccgatttacataatattttgtataaaaaacgtcaccaacgtggggctattgattttgaagaaccagaagcaaaaattgtagttgatgataagggtaagccaacagatattgttcttcatgaacgtggaactgctgaaaagatgattgaatcctttatgttgatggcaaatgaaactgttgccgaagactactataagaaacatacacctttcctttatcgtgtacatgaaactccagatcaagaaaaaatgcaatcattctttgagtttgtaagtgcatttggactaaacgtaaaggctgatccaaatgatgtaaagccaaaagatttgcaaaagattgtagctaaaaccgagggtacacctgaagaagctgttgttcaaatgatgatgcttcgtagcttaaagcaagcacattattctcctgaaccactgggtcactttggtttagccgctaagtactatactcactttacttccccaattcgtcgctattctgatttaatggtccaccgtatgattcatgaatatgcaaatgaaaatatggatcaagatattcaaaagcactttaaggctcaacttccagatgttgctgaacaaacttcaacacaagaaagaaaatcaattgatactgaacgaagtgtaaacgatctcaagatgactgagtttatggctgataaagttggtcaaacatttgatgcaatagtttcttcagtaacaagttttggaatgtttattcaattgccaaatactgttgaaggtttaattcatatttctaatttaaacgatgactactataattttgatgaaaaatcactaactttaactggacgtaattcacataagcagtttaagattgggatgccaataaaagttaagttgattagagctgatgtggaacaacatcaattagactttgaaatttatgatccgaatgccccaaagcgtcctcaaagaagtaataatcgtggaaaacgtagctttgataaaggacgtaaaaatggtggaaacaagagaaataacaatacttctcacgtaaacaatggccataattttaagattcgtcatcgcaaaacaacagctgtcaagtccaataaaaaataattaggaagaaaacgatgaaacaaaaagcagataatttgattgctcaaaataaaaaagcaagtcatgattattttattaaagaaactcttgaagccggaattgcgttaactgggacggagattaaatcaattcgtgcacgtagaattaatttacgggacggatatgttcaaattattaatggatctgcttttttagaaaatgttcatattagtgaatataaagaaggtaatcgctataatcatgatcctttacgatcacggcgcttgttgcttcataagagagaaattgctcgcctagctggaattcaagctcaacagggaatggctattattcctttaaaagtctatttaaaacatggatttgctaaagttttaattggtgtgggacaaggtaagaagcaatatgataaacgtcaaactattaaaaagcgtgatcaagaccgtgaaattcatcgtaagtatgggatttagtaggtgaattaaatgattagaaaggcaaaattaactgattttcctttagtttatccaattttaaaacaaatctttgacgagatggatatggatactattaaagctcttccagagagtcagttttatgatttaatgaaacatggcttttattctcctcattatcgttactcacataatcgtatgtgggtagaaaccgatgatttagatcgaccaattggtttaatagtaatgtatggttatgatgatcaaggtttgattgatatctcattaaaaagtgcatatccgaaagttggattacctcttgatgcagttattttttcagataaagaagcactcccgcatgaatggtatctggatgctattgctgtttctccaaaacattgggggaagggaattggacagaaattaattaaaatcgcccctgggatagcacgccaaaatgggtataaaaaaataagcttgaatgttgatcaagataatcctagagctgctcgcttgtacgattatatgggctttaaaacgacttctaccatgacgatcggggatcgtatgtatgaccatatgattaaaaaagttaattaaaacaaaagagaatcaatcactaaagaaagattgattctctttttgttattaaatttaaagaaatatttaaaaataacactaattacattattaatgttgcataccctttaaaaacctgttaaagtaataaaactatgtaagattggagagtgatcatagtttaattagaaaggaaattagaatgaaatgctggatgaattacaacgagttcaaatagctttacatgatatgttatctcaaccagacctaaagaaaataaatatttctaaactttgtcttgaagcaggaattagtagaagaactttctatttacgatatggaaaaataaataactgtattgaagcttgtattttactagagctgaaaaaagaattacgtaaaaatgaaaagaatagtttaagacaaattcttaatagtttatgtagctatattcaaaaacataaacaatatttctataatgcatataatttcagtgaagaaaactgtatgtgtgaaaagatgagggaacacttttttcaatatattcgctcatatgtttacaagcgaggaagtttttcagagctcatccttaaacaattgactaatatcctctatgatcgaatttgtttttggattagtcatagctgcaataaaagttatagttatttattggaagatttagcaatcattattgaattaattgattttcaaaagcacgtttgttctcatcaatatcaagtgtttaatttctcacattattatttaaactgtgattaagaaagtgcattaatttgattttgaaaattaaaagttggcaaaaatagtggtttagtatgccactgtgtaaaaagcaaactaattaaaataataaaggggacgtcttcaggacgtgagatatcacagctccaggtaagccccacgtcagtgactagtgaagaaacgctagccacttttttaatacctgagtaaaatccgtatcttccttgttttaaacttcctttgatccaataatttaaccgagtaatatagaataaattagtaaaacgactattaagtttttttactttgactagagaatgattgactacatcaacactataacttgctaaaagatggttagagtctaaataaagtcgaccaatttcattatggttaatatcagttaaaatgattggttggttaaattcattaagattaccttttaagatataaactatttcaccctgatcattttttactggaatttgaccacaagtttgaccatgtgtaagttggacagtataacgcataatttcatctgcctttagaaaaattatgttaatttacaaaaatgacgaattgcgtatgcaactccattatcattgttacttttagtaataaagttagcaattttcttgatttcaggcgcagcattttccattgctacacctacgccagccatgcgaatcattgattcatcattaagattgtcgccaatggccattacttcatttggttggtagccttgcaagcgagcataatccattaaagcaatccctttttgagctttaatattgttaatttcgatattagtagaagaactcgcagtgacaattaaatcacccatttttccgatttcttcacgaatatgtttaaatactttagggccatcaggatgaaaagcaacaaatttcatggcttcaaagtctggtttttcaagcaaatctttaaagtcagaaacatatttaattctcatgatttcatctgagccagcagcaaaagaaactgcctttttaaaagttaattttttgttgagatcaaccaatagatcagaaaagttagcaattctgcgcaaacgagaatctgaataaacattatctgcagcaactatttcaaagtaaaaaccagaatctttgagtaatttattgatcttaatactttggtctttaggaattggttcatttacaattagttcgccagcagtattaaagatcattgcaccattcaaattaatgaatcctgtatgaagtccggctttagcaaggatgccctgagattcggaaggcgcccgacctgttgcaactaaaaattcaacgccttttgcttgtgcttcttttatagcagcaatattttcagatgaaatttgcatttgtttatttaacaacgtgccgtccatgtcacttgcaataagtttaatcattttaagtcctccaatcttttatctatatgatatcatgaacttggatttcttagagagacaagaggatagaataagtatgaaaaaattaattggaaatgattgggatgaagttttagcaccagcttttgaaagtgaaaagtatcaagaattacgtgattttttaaaggaagaatatcaaacgaaacagatatttcccgatatgtatcatatttttactgcttttaaattaacaagttttgcagatacgaaagttgtaattttaggacaagatccatatcataatccaggtcaagctactgggatgagctttagtgttaatccaggagtgccattgcctccatctttaaaaaatatttataaagaactatatgatgatgtgggtgcagttccagtaaatcatggctaccttaaaaagtgggcagatcaaggagtattactgttaaatgcagttttgactgtaccatatggaaatgctaatgggcaccgaggtaaaggatgggaactaattacggacacagccattaaggcgctaagtgaccgaggaaaagttgtcttcattttgtggggaaaatttgcacaaaataaaattcctttaattgatgagggaaagaatgtaattatcaaatctccccaccctagtcctttttcagcagatcgtggctttttcggttcacgtccgttttctagatgtaatgatgctttgattaaatttggtgaaagtccaattgattggcaattaccacaagaagtaaacccagcagatatggcatagtttttgttttgagaaaaagctttgaaattgtaaaatattatctataaataaaaaaagaaaggcttaatttgttatgaaagtatttgactcacttaagaaaaaagcagaagaatcaaagaaagtaattgtttttccggaaggaaacgatgacagaataataaaagctgctgttcgcctcgaaaaagaaggtattgttaaaccacttttactgggaaagcctgatgaggtaataaagactgctcaaagcttgaatgttgatctaggctcaattgaaattattaatccggcagtttaccctgattttgaaaaaatgtgtcaagactttgttgagctaagaaagggaaagaatactttagccgaagcaaaggaaattttacaagatgtttcttactttggcacaatgttagtatatgaaggaaaagccgatgggatggtttcaggagctactcattctactgctaatactgtgcgtccagctcttcaaattattaagactaaaaaaggtatgagccgtgtctcaggagctatgatcatggaacgcggagatgaaaagtatatttttgctgattgtgctattaatattgatccagatagtgaaactctagctgaaattgcttatcaatcaagtaaaacagctgaaatgattggtcttgagcctaaaattgcaatgcttagcttttcaactaagggatcagcaaagggcccaatggtaactaaggtgcaagaagcgactgagttagtacaccaaaaatatccagacttaatttgcgatggagaattacaatttgacgctgcaattgttcctcgtgttggagaagcaaaagccccaggttctgcagttgctggacacgcaaatgtgtttattttcccagaactacaatctggtaatatttcttataaagtggcagaacgtttaggtggatttagcgcaattggtcctgtattgcaaggtcttgctgctccaattaacgatttgtcacgtggatgcaagacggaagatgtgtatttattagctattttaactgctgctcaagctaatatggagaaataaaatgaactcattagaaataaattctgatgaacagatgcaaaagttaggcaacgcaattggtaaaagtagtaagggtcatgatttattactcttatctggtgatttgggtgccggaaaaactacattaactaaaggaattgcaagagctttaggaattaaacgtcctgttaaaagtcccacttttacaattgttagagaatatcgggaaggtaagagaccgcttttccacatggatatgtaccggctagaagatggagacttgtcaagtattgatatgcccggatatctagctgaagatgggttggtcgtaatcgaatggccgcaatttattattgaagacctacctaacgattatcttgaattatcgattaagcgtgtagatgattcatgggattctaccaagcgaatagttgaatttaaagctgtcggagaaagaaacaagctttggttgtcagaaataaaaaaatattttgaataataaaaaatggttaagcttagataggcttaaccatttttttgattggatcatctccaacacgtttattttcctcaattaaaatacctgcacaagcttcgctatcgcttaaagcattatggtggtgccataaattgatatttaaagcttctgagactgtatctagtttgtgattaggaagatagggctcaaaggctttactagttgctaaagtatcaattgcaaagtagtggggtgccggaatattatagcgagccagcgatttctccattacgcggcaatcaaagcgagcgttatgggcagctactaacattcctggttgatataatttttttatttttggccagacttcagccattgttggagcgttttttacgtcttcagctgtaatgccatgaatttttatatttcttccatcaaaaggcatttgtggattgataactgtataaaaacgatccacaatttcattatttctaaccataactaaagcaagagaacaggcactttccggatgactgtttgccgtttcaaaatccattgcagtaaagttcatttttatcctctaaataaaacattatttttctttttagtataacacttaaggtagaaaactatccatttaatgcggtatgattaaagagatgattatttaaggaaaagagagataaaaatgcaactgatggatttaagaaaacaggggattgacattcaagaaaatattccattgagccgttttacttttactaagacgggaggacctgcgcagtatcttgcttttcctaaaaatttaaatgagctcgaactattagtagatacggttaaagaaaataatattcccttaactgttattggaaatgcttctaacttgatcattagagatggtggtatttctggtttagttttgattttgacaaaaatggacacaattgttgcaaataaagatgaggcaactgttacagcggatgctggggcaagaattattgatacatctgaagcagcatgtgaagctggtctaagtggactagaatttgcggctggtattcctggtagtgtaggaggagccgtctttatgaatgcgggcgcctatggcggtgaaacagaatttgttattaagtctgttcgtgtcttaactcgtgctggtgaatttaagacttacacacatgatgaaatggaatttggctatcgtcactccttggttcaagaaactggagatattgttgtgagtgctacttttggtcttgagcccggagataagtgggctatcaaagcaaagatggaatattttaatggtttacgcagagcaaaacaacctctagaatatccttcttgtggaagtgtttttaaacgtccagcaggacatttcgtaggaccaatgattattaaagcaggtctgcaaggtaaaagaatcggtggagcagaagattcaatgaagcatgctggctttatcgttaatgttggcggtgctacagctactgattatttagatttaattcatttaattcaaaaaacaataaaaaaagactttggtattgatttacaaactgaagtaagaattattggaaaagaaaaagattagatactagtacaaagctacaagtaacggcttgtagctttttttatgagatagatggtgagaaaaaattgagcgatattattaaattaaagcatgttcgtaaggaatatgatgatggttttgtagcactaaaggacattaatttaacgattgaatcgggaaaattttattctttattaggaccatcgggttcggggaaaactactattttaagaataattgctggatttagcgaaccaacgagtggacaagttttttttgatggacaagatattactaatttagatgctgctaaaagaaaaattaatactgtttttcaaaattatgctttatttcctcatatgaatgtttttgaaaatgtggcattcggtttacagatcaagaaaaaggataagcaagaaataaaattagctgttaaagaagctttacacatggttcaattggatggctttgcaaaccgagaaatttctgaattaagtggtggacagcagcagcgagttgcaattgctagagcaattgttaatcagccaaaggtactacttttagatgaatctttatctgccttagataaacgtttaagaaaagatatgcaatttgaattacgtgaaattcaaaaaaagctggggattacttttatttttgttactcatgatcaagaggaagccctagcaatgagtgatgaaatttttgttttaaatgaagggaaaattcaacaaagtggtagtccggttgatatttatgatgaaccagttaatgactttgttgctcgctttattggcgattctaatatcttaagtggacggatgattaaggattatgaagtggaatttggaaatcatcgttttgaatgtgctgatgcaggtattaaacctggtgaaaaggtagaggtcgttttaagaccggaagatttagatatcactgatattgaacatggaaaactaagagttgtggttgaaagtcagctctttttaggggatcattttgaaattaaggccattgatagtgacgaaaatgaatggttaattcactccactaatccaactaaaattggtaaggaagtaggagtatattttgatcctgaagatattcatgttatgcgttttggcgaaagtgaagctgaatttgataagcgtttagaggcatatgaaggagaggagtaagatatgaaaaaaagtaaattgttttttctcattccttatattctatggcttgggttatttgttatcgccccgattattttgattacaattaatgcatttaaaggggatgatggctttactttaaagaattttcagcaattttttgtcaatggtacttttttaagaatgactctaaattcattttggtatgcattcttaattaccttaattacgctgctaatttcttatccaattgcctatattttaagccaaatgaaaaaccaacaattttggctgttattgattattttgcctacttggattaacttgcttttgaaagcttacgcatttattggcatttttagtaagcatggactattgaataattttctacgcctttttggaatagcacctgcaaatattttgtttactgattttgcctttatttttgttgcagcttatatcgaaattccatttatgattttgccaatttataatgcaatttgtgatattaatcctgctgtaattcaagcggcttacgatttgggtgcaagtaaatggcaaacatttattaaagttttatggccactttcaaaatctggagttgagtcaggaattcaagcagtattcataccttcactttctttatttatgctaactaggttaattggaggaaatcgagtaattacccttggtactgcgattgaagaatactttatgacgactatgaattggtcaatgggttcgacaattggtgtggtattaatagtgttaatggtgattgttatgctctttacctcatcagatcatcatcataaaaaggagatcaaactatgaaaaaaataaaatggtcccgaatctattttgcttttgttctggttttgatgtatttacccattttttatttaatattttattctttctcaagtggtcataatatggatcattttgaaaagtttactttaagtcattatcaggatctttttaatgataataggctattagccatttttctagaaacaattttactagcactcttatctagtttgattgccactataattggtacttttggagcaattgcaattagtcagactaaaaataaaaaaggacgaaaaactttgctagccttaaataatgttttgatggtatcaccagatgtaattatcggggcgagttttttaatcttctttacttttttagggattggcttaggttttggatctgttttattaagccacattgctttttcaattccaattgttgtattaatggttttgccccgcttaaaagaatttgattattctttagtagatgctgctcgagatttaggtgcatccacttggcaagtttatagcaaggtaatgattccggctattacgcctgggattttagctggcttttttatggctttgacttattccttagatgattttgcagttactttttttgtgacaggaaatggtttttcaacattgtcagtagaaatttattcacgtgcgcgccaaggaattaacctagaaatcaatgccttgagtactgtgatgtttatttttgtaatgattttagtacttatttattatgtaattactaatcataaaacccatattggtaaggggcgtgcacaatgaagaagctgttaattggaattgtgactattctattggtttgttttggcttagaagctggggctaaacaattaaataataatggtgttagcactaataataaaaatttgattatctataattggggtgattatattgaccccaagctaatcaagaaatttgaaaaacaaactggatatcatgtaatttatgaaacatttgattctaatgaagcaatgtacacgaagataaaacaaggtggtactgcatacgatatttgcgtcccttcagactacatgatttcaaaaatgcgtaaagctaacttacttgataaaattgacactaagaaaattccaaattacaaaaatattgggagtgagtttttacatcactcttttgatcccaaaaatacctactctgttccgtatttttggggaacgttaggaattgtatataatgataaatttgtaaaacctgggcaaataaagcattggaatgatctctggtccaaggattatcggcataatattttattagttgattctgctagagatattatgggactctctttagcgtctatgggaaagtctttgaatactactaattccttagatctaaaattagcaaaaacaaagttggacggtctcggccccaatgtaaaagcaattatttcagatgaattaaaaatgtatatgattcaaaatgaagctgctgttggagtaacgtggtctggcgaggctcgtacaatgctaaacgataataaacacttacattatgtagtgccacctgaaggctcaaacttatggtttgataattttgtcattcctaggaccgtaaagaataaaaaaggtgcttatgcttttattaattttatgcttgatcctaaaaatgctgctcagaatgcagagtatatcgggtatgcaactcctaatgtaaaagctcaagaattattaccaaaggaagtaaaaaacgataaacaattttatccaagtaaacaagcaatgaaaaatttacaagtttatcaagacttaggtccaaagaaaattcaagaatataatgatctatttctcgaatttaaaatgtatggtcgataagagcttggtttatttataattgaattttaggagggtggcaatgaagtttaatattgagcaaatatttacctggcaaaacctgatgaatattattgatattttaattgtatggtacattatctaccgtttaattatgttggtaagagggactaaagcagttcaattagttaaagggatatcattaattattctggttagaattgtagctgggttgttacatttacatacgttaacgtattttgtcgatcaaattctttcttggtcagtaattggaataattgttattttccagccagaaattaggcgtggcttagagcatttaggtagatcaccaatttttggtgggactacaatgactgaaaagcaagctgctgaaaagatgattggagaattagataaagcaattcagtatatgtcaaagagaagaattggtgctttgatcacgattcaacaaaatacaggactagaggactatattgaaaccggtattccaattgatgctgatatcactggtgaattattaatcaacatttttatacctaatacgccattgcacgatggtgccgtaatcattcgcaataatcgaatagcagttgctgcagcttatttacctctttctgataatagtatgattcctaaaaaacttgggacacgtcaccgtgcagctgttggtatctcagaagttaccgatgcaattactatcgttgtttcagaggaaaccggtggagtaactattactcgtaatagccagtttatgcttgatctaactagagaagaatatttgaaatatttaaatgctcaattagttccaaaagaggaagaagaaaagccaaagtggtatcaaagaattgtaaatcatgtttggaattgggggtcaaataaaaaatgaaaaagttttttgataaaccttggttctatcgaattattgctttgattttggctattttattagctgtttatgtagcatctaatcagcaaggttatgttactcaaggccgacgtgaagaaaccttaaaaactgcaactaaaacccaggtaattaaggtacccttacaagtttcagttaatacggataagtactatgtaacgggatatcctgaaaaagtaaatttaactttagagggatcgaatgctttagttacatctactattaatactcaaaacttccgtgtctacattgatttaagccatttaaaaacaggagagcatactgtaccaattaaggtaaatggtttaagtagtcaattaacttataatattagcccaagtaaagtacgcgtaaatattcaaaagagaaaatctcgtactcttcctgtacaaatagagtataataagagtgctgtagctcgtgggtataatcttggaactgctaaaagtgatccagaagtagttaatattactggagctaaaagcgaagttaaccaagttgatcgagtagtagctcgggcaaatttaccaaagggaatagacagcacatttgaacgtgaagaaatgctggtagcacttgataaagatggacatcagcttaacgtcgttatggatccagtaacggcatatattactatcccaattaacttatctaagaagaaggttaagataaatgtaacgtcgaagaatgaatcttcgactcatgtttattctttaaccgcaaagaaagaaaatattgagatatatggtgatgaaaatacgctcaagaaaataacgtctcttcctttaaaggttgatttaagcggtattgatcatgatgttacgaaaaatgtcacacttaaattgccagatggcgttgttaaggcatcaccatcagtgataccagttcatataaaagtaactgatactactgctaaaaaagaataaaacaaggaaaggttgttaaaaattatgcttaaatattttggaacagatggtgtacggggggttgctaatgctggcttaactccagagatggcttttaaattaggtcgtgatggaggatacgttcttactaaggataaaaaggatggagaaagagctaaggtattagtttctcgtgatacacgtatttctggacaaatgttagagtatgcattgatttctggtttgctttccgtcggaattgaagttttagaagttggtgtaattactactcctggtctttcttacttagtacgtgcacaaggtgcagatgctggtgttcaaatttcagcttcacataatccagttgaagataatggaattaaattcttcggcagtgatggcttgaagctatctgatgctaaggaagaagaaattgaaaaattaattgatgcgcctgaagataaacttccacgtccttctgcagaaggtttaggaactgtaacaaattaccatgaaggtgcttctaagtacttacaatttattgaaaatactttaccagaagaattaagtggaattaaagttgttgtggatggcgctaatggtgctgctagtgctttgatttcaagattatttgctgatatgggggttgactttactaccattgcaactcatccagacggtttaaacattaatgatcatgtgggcgcaactcatactaagaaattacaagaagaagttgtaaaacaaggtgctcaattaggtttagcatttgatggggatgctgatcgttgtattgctgtcgatgaaaatgggaacgaagttgacggtgatcacattatgtacgttattggctcatatcttgctgatcatggtcgcttaaagaaagatacaattgttacaactgtaatgagtaaccttggttttacaaaggctttggaaagacgtggtcttaaaaatataagaacacaagttggtgaccgttatgtttcagaagaaatgagagctaatggttataatcttggtggagaacaatcaggtcacgttattattagcgactaccacaacacaggtgatgggatgcttacgggattacatttattatatgtaatgaaggataccggtaaatccctcagtgaattattgagtgactttaaagaatacccacaacgtttaattaatgttcctgttgaaaataaaaaagactggaaagaacataaacgcattactgaagccattgaaaaggttgaaaaagaattaagtgatgaaggacgtatttttgttcgtccatctggaactcaaagtttgcttcgtgtaatgactgaagctccaacacaagaattagctgacaagtactgtgaagaagttgctaaggttgttgaagaagaaatgggttcaaactaaaaactaattatttttggctttatttaaaatttaatatggtgatggtgttcaccaatttaaccgattaatatctgacgacgcctactttcttggatcaacagggaggtagtgtcgtctttttttatgcattttttgtataatagaaaggagagtaaccgattacataaggagaaaagctaatgaatataaaattaattgctgtagatcttgatggaacattattaaatgataaacaagaaataagtgttaaaaccaagcaagcacttcaaaaggcatcaaagatgggaataaaaatagttccttgctcaggtagaccatttccaggtattaaggactatcttaatgaattggacttaaaggattctactcagtatgtggttgcatttaatggagctttagtgttaaattctcaaggaaaagcaatcgttgaagaactgttaagctataatgattttatcttttttgaaaagattgctgataaattacaagcaaattttcatattgaagtaagagataagtttattacattagatcattttattaactattatctatcacgtgaaagttggctaacaagaatgccaatagaggtttctgaactaaaagatatttcagaagatattaaatttactaaggcaatgttttcaggatctccagctgaaatgaagaatatttatgggaatttatcagaggaagtatttgaaagatataatgtctcaacttcagatgaaactttgattgagattaattctaagcatgcatctaaaggaaatgcgttaaaagagttagctaaaaaactaaatttaaaagaagatgaagtaatgatttttggtgatcaaactaatgatatttctatgtttgatgtgccgggattctataaagtagctatgggaaacgcggtttctgagataaaaaagcgtgctaattttataactaaaacaaataatgaagacggaatagcgtatgcattaagaaggctggtttttaatgaatagacgattgaaaaattatttaagtgtagggatttttgctttttttggaggtggactgcgagcctatttaaatttaatctggtcacagactggaactttgactgctaatattatcggctgctttttattagcattttttacttatttttttgttgaataccgagaaggaagagattggctagttactggactaagtacaggatttgttggttcctttactactttttcaagttttaatttagatactcttaagcaattagaaagtgggatgaatagtcaagcaactatttatttctttagttcgatctttattggttttttatttgcttatttgggaatgttagtaggtaaaagaacaggtagaaagttggcagaaaaagcatgataacagttttaacagccggattcggagctatttggggagcaattttaagatatggcattactaactatggtaaaaaacattggtctgagaaatttccgtacgcaacgctattaataaatcttacaggagcatttttattgggatttattttttctcgtaaattctcaccctttatctatgctttgattggaacaggagtattaggcggttatacaacattttcaacgttaaacgttgaattgctgtctcattggcgagatcgtaattacagtgtattcaccctatatgcattgctatcatatggtggtggcttaattttagtatttttaggatataaagtaggtactttgatttagatctcaataaaaaagaatgtatcagattccgatacattctttttttgatagttattaattttgatttttaatcgaaacttttcctactttgcttgaaatatcaattaaattagttgaatcttccttaccaacatagccttcaattttatcgtaatcatcgtttccgtaaataatggcatcaagaggaaaatcagttggaccaatttttttggtattaattttgaatttgaaaaatattgccggtgggacattaaccgatatattaccaactttactttgaattgataaattaaatttagacttttcagccagtgataagttaattttccccaaatcagatttaatactaccacttccattaagattatttaggagtatgaatcctgtatcggttactaaatctatattctcgcttgtaactttatttacaacgattttgccacttttagtatctccaaaaaagtttttagttttaatattttctaattctatattcccactgactgtgtgataagatatttcttcttttgcatttacatcattgctgctaagtgtccccgaatgcccattaacatgaaagacattagctgaagtattagaaatggcaatgtctcctgattttaagtctgcttgtacgcgtttaagagtagagtgagctaatagaaaatctcctgaaaccgcagttacatctaccatacaataattagaaatcttattaatatagacatccccactttgactgcgaatagttagaaaaccagtgaactctttaggtaaaaatagcaaagttttatttttaaaaataccaactagtttgcgagggccttgggtaatttttaaaacatttccaactttttcaactgttgagtgtaggtttttaatatcgcgagacataaagtcatgtacgattagttgggaagaattggttggtaaaactaaaatatcacccaagcgatagttaagatgaatttcatcaatttgatttaattttatctttagttcattgactagttttgaatcgaaaattttggcgaaaaaatcattatattttacatagtcattttcttctaaagattttagttgagaaagcatggtatcaagatccgttaaatttaaaagtgctttttgttctgcttcaaattgactggcaccatgctgaatttctttttttattaagtttttaatttttttacttaaagtattttgtaaaggcttattttctttaatatgaggaaatttattgaaaaattcttttagtttttcatcaatcatgctgaactcctttgatatttgttacacttttattatatagcactaaaaaatctatggatttactttattaagtgtaaaaaataatcttaaaattttcattaggagaaaaaattgaaatttgtaaaatggatttggagattggttgtagttgggctcatctatatatcattgagtttaactttaactagtcccgtagaattaaaagtagacagcacagccggcttagtaaaaagttctattaataaggtggttgatcaagcaaataatagtgatttacaaatgggtgttagttttctgcaagattcaggtattgaagatacactcttgtcgcagttgcctaaaaatatcgaattaaagacatcttatcaaggattaaatcaattaagcaccaattatttggctaatgataagttaacggatgttgatctgaatttaaagaatgatacgcagcaggagcaagtttttaatcaagtcatattacaattggtaaatgaacagttgaggcaaaattctgattcggtaaaacaggctgctgagatttatcatttaatttacttcttgttgattggactatatattttggcaatggctttagctttgtttggaaaaaaagtagcccttattccacttttaattgcggctattggatcatatggtgttttatcttatgcagcccagattgccacgagttcgctgcatgaaagtgtgtatagcggaattaatgtaagcctaagcagtggattaacacaagctttaattaccgcaattattgcggctgtaggctgtctatttattaaaattaagcaggagcaggaataaaaatgctatttaagacaagtgataatgtagaaattaattaccagttaacgggaaaaggaaaaactattgttttggttaacggctttggagcctatcaagaaatatggtcagcacaagtcccatttttaaataaattagggtatcaagttttaacttatgatcacagaaatatgggaaaaagccaacgaacagaaaaaggtcatactatcgaacgtttgacacaagatttgaatgaattgacatcatttttgaaaatcaaacaagctatttttatgggacattcaatgggcgcttctatcatcttttgtttaatgaaaaataatccaaagctggttaaacaagcattgttaatagatcagtcacctaaaatgcttaatgatgaaaattggaaatatggctttatggattatacaaaagaaaattatttaaaaaaatgccaagaaaggccacgggttcatgaaacatataatggcttggatgataatgtgtatgctaagttaatgaaggccaagaaagccaatccatttaatagaaaagataatgtagatttgcttgaaaatcatatgtcattagattggcgaagagttttagaaaaaacaacaattccaactactttttttgttgcaaaggaaagtccttattatcgagagggatatgaaaagaagcttgaacaaaagaatagccgaataaatagctttattatgtcaccgacgggacatgtaattatggcggaaattccacagcaatttaatataaagttaaaagatattttaaagtaaaaaagagggtctcgtattagaggccctctttttaataaactaacttagtctagttttttattaatatttgctaaattctgataattttctgtcatccattttatgtaacttgtattgttggggatggtttcacgaacttgcaagattggaatattttttgacttagctctttttacaaaattattaacagttgaactgcttacttgagaatttttaacaaagaaagaaattccacgattattaattgtttggttcatttgatgaataattttggcacttggatctgtttcattttcaattgcttcttcaaaagctttatcaccaatcttaaagtgagtagcatttaaggcatagtcaaacactggctcgctgacatatactggcttttgttttgcaccatcaatagaatctgcaattttttgtatcttattgatttttgcaagatattccttcccattttctttgtagtaagctgcatgttttttgtctattttagagagtcgctcaactaaatagttaacatattttttaggcatgtttaaatcaaaccaaatatgcggatttgcgccattttttagattcattaaatcttcgccaactaaaacagcagacttattagttgatttagcaagcttaggaagccaagaatcatagcccaaaccgttagcaacaacaatttttgcattttgaactttttttgcgtctgcagttgtgggttcaaagtcatgtggatcagtagcactgttagtaataatagcagttgctttaccatattttcctaagacattttgtgcgatatcggcataaacattagtacttgttacgatagaaattttatttgatgaattttctttttttgagcagccagtaagaattaaaacaagactactaattgcaaaaaagaaagcaaaaatcttttgataatgttttctcattctatatatttatcctttcgaattatgttgtttagatctgcattcaatataaatcatagcagaatttactaatattttttaatttgctaatttatttttagtaattcgacttagtaagcttgtgttatagtagaaagaaattatgaattaaggttgataaaaaatgaaagctacaatatatatcacgggtagtattgctgcatataaggcaattagtgttgtacgtgattttcaaaaagaaggacatgaagtaagagtagcgatgaccgaagaggcagttcatttgattggaacacaaactttagctgctttaacgaagcatccagtattaactgatctctggaaggagaatagagctgataagatccagcatattgaattggccgactggactgatattgcggttgtagttccggcaacagctaactttattgcaaaaatagccaatgggatagcagatgatgctgcaagtacaacgtttttagcaactgctgcacctaaatatgttattccggcaatgaatagccatatgtggagtaatcctgcatttcaaagaaacttacagcaattaaagcaagatggaatctttgtaatggatcctgatactggccgtttagctgaaggatataatggtaagggaagaatgcctgaaccagcagcaatcatgaactgggtaaactcatctcttcaagtaaatgatgaattagctggtaaaaaagttgtaattactgctggcggaactgtctccccacttgatcctgttcgttatttagggaatcgctctagtggaaagatgggactggccttagcaaatgcagctcttagggctggtgcagaagttgttttgattgtaggacatgtttcagttcctgttcctgagtcatcaaaaatgacggttattcatgtagagacgactgaagaaatgcttgcagctgtgaagaaagctttttctactgcggatgctttaattatggcggctgctgtagcggattatgagccagtgaactacatagatcataaaattaaaaagcaagatcaaggagataaactaaaaatttatttaaaagaaactcctgatatcttaaaaacaatggggagtttaaagcaagaacagcaagttgtggttggttttgcagctgaaacaaatgatttactcgaaaatgcgactaaaaagttgaaaaataaaaatgcagatatgattgtagccaataatgttagtcagggagtatttggaagcgatagggataaggttacggtattaagaaaagataaagcaaatgaaaatatcgcagagacaactaaagtagaaatagctaagaaaataattactttagttgctgaagagcttgaaagtaggaaagttataaaatgaaaaaaactttgttaactaagcgagaaattatttttgtatgtttaatgattgctgtattactgggattgtttatttctagttcaatgacttatcatgagcaagagatgtcaccaggatttatacatcgtcattttccaattattgaaagaatagtaggaaattggaatatttattatggtggacgatggcataatgcagttttggacaatggtgaagctggggtgacacagtttgtcatgagaaagtttgctcacttttcatcttattttttagtgggtttgtttgcttgtttgggattagatcgattgtttaagaaatggtgtggtcctttatttatttggctaggtatcattggtttggccggattagacgaatttcaccagtatttaactggagacagaacacctagtgttcatgatgtagcgcttgattcagctggtgcacttttagcgatcttaatttgtatttttgtttattggcttagacatcgtgcagaaaaaagtaattcctagattgaatttaaacctttagtgcgttatgattgacaaggttaactatattaaataaaaagaaagaaggattcttatgtcaggacattcaaaatggcacaatattcaaggccgcaagaatgcgcaagacgctaagagaggtaaagttttccaaaaattatctcgtgaaatttatatggctgcaaagagtggtggtcctgacccttcaggaaatcctactttacgtatggttatggataaagcacgtgcagctaacatgcctaagactaacattgaacgtgctattaaaaaggctgaaggtaattcagatgaacattatgatgaaattacctacgaaggttatgcaccaggtggtgttgcagttttagttgaagctttaactgataacaagaaccgtactgcttctgatgttcgtgttgcctttactcgtaatggtggttctcttggtgcaactggttctgttgcttacatgtttgaccgtaaggggtaccttgtaattgatcgttcaactactgacgctgatgaagatcaagttttgcttgatgttatggatgctggtggagacgacttggaaactagtgatgatgcatttgaaatctacactgatcctaagcaatttactgctgtacgtgatgcattggaaaaagctggctataagttagctaatgcagaattaactatgattccacaaaacaccactccagttccagcagataagaaagagcaatttgctcatttaattgatgcattagaagataacgatgacgtttctaatgtatatactgctgctgcagatgatgatgaataataatttatcgcaaaatagatctaaaattatattttaggtctatttttttggactgacctttaggtcagtccattttttttgcaaattattttgaataataaaaaataattttgattttttgcgtactaataaatatagagtaaaggagggattaagagtgaatgagatgtcggaaagaattttagaagaggcgattgaaagacatgctagtgatatttttatctttcctattatcaatggatacgaggtaaaaattcgaactgcaatgggtttagataaaattcaagagttaagtcgacatggtggaagagagctcttaaattattttaagtttcaagcacagatggatatttctgaacggcgtagaccccaggtaggagcgtatcagaccgagtttaaaagaaaaaagatatttttacgtttttctagtgttggagaatttgccggagctgaatctttagtagttaggttgatttatggagaaaagaataataattattttcttccggagcagtttaatttaattaaaaaacttaccaatcaacgtggattaatagttacaagtgggccaacaggatcgggaaaaacttcaaccatgtatgagttagcgcaagtgattggaaaaaataaagttgtaatgactattgaagatccagttgaagtgtggaatccagacttcttacagacgcaggtgaatctaattgcggggattacatatcccgatttgttgaaagcagctttacggcatagaccggatattttaattattggtgaaattcgagatcaagaaacagcaaaaatcagtattaatgctgccctgagcggacatttagttttagctactattcatgctaagacggctttgcaaacaatatcgcgtcttgaaggattaggtattactaaagatgaactgagtaattgcttaacggcggtttcctatcaacggttattacctataaaagataaaaatgatgttgcttgtttaatggatattggatatggagaaatgcttaatcaagcaatcactaataacgataaacgtggtaatttgcatgattggcagaatagtttaaatcaattagtaaaacgaggaaagattagtgaaaaaactcagcaactttttgaagaaggataagttaaatagtgctgaccaattgatttttattgattatttaaggcaggctttaattaatggatattccttgaatgctagtttgagactattaccaaaaatttggaggggtaattctcgtcaacttctttatgtaaatcagcgagtagaagaaggaagccagttgggagacgtactgcaggaagtgggattttctagcactctagctgcccaaataaatctagcagttattgatggaaatctattatcttgcttagatcaaatgagtaaacttattcgattaaagaataagcaattaaagaagttaaaaggagaattagcctatcccgcgcttttggttgggatgatggttactttgctaatttgtatgcaaacatttctaaaaacagaaatgtctgataatgacttgactagtaatgtaatgcttggtggcctgatacttttggttattacagcagtattttttattagtaaaacaattagattacttaataaacaagattattatgctcttaaaaaactaacaaatttacctatgattggagctgttttacggttatatgttcattatctagttgtgtctgatttagcagttttattaattaatggtttttcactacaaaaaatctgtcaacttactgctatgcaacctgataggtcattacaacaagttatcggggtaaaagtaaaagatcaactagaaaagggtactgaaattaaagaaattattgagcaagaatttttcatacctaataatttggtcatgcttctagaaactggaacaactagaaaggaaattggaaaacgtgccttattgcttagcaagacacttttttatgaactgaatctaaaattgaatagcctaattctcaatatccaaccgatatgctttatttttattgggatttgtattttagggatgtatttaaagatattaatgccgatgtatcacttaatggaaactatgtagaggaaaaataaaatgaaaaaattaaaacaatttattataaaaaataagcaagtaaaaggatttactttagtagaaatggtaattgtaattgcgatcattgcaatgctaattttgctgattgtgcccggactaagcaaacaaaaagatagagctacgagtaagactgatgaggctttaagaacaacaattgagacacaaagacagcttgctgaagataatggagatggaacttccttagaagaacttgtaaagaaagagtatatttctcaaaagcaaaaagaaagatatgaaaaattaccacaaaaatgattttcaaaaaaacgagaggatttacattaattgaaacagtagttacattagcagtggtttgtcttctagtcttgatgccaacgctttatgtcaagaatatcaagggagcaggtggttttagataatagtacacgtcaagtgaaatctaccattaataagtatttacatctagcaacagtaaaaaagaagccatattttttgtcatattttgataataattcttcgattcaaataaaggaacctcataaggtttcgcaagtttatttagataaacatattagggtttacaattttgataatctttacattagcaatcgtggaacaatttcaccacggacgattaccattaagaatggtaataaagaaaagaaaataaaaatacaaatgacatggggaagaatggttgaagaataaaagaataaaaggatttattttctgggaagcatgtttaggatttacaattgcttgtttgggagtaattttattaggcttgacacttaagcaaaataggcaaacggaaaaacaaattgaaaaaagagtagataagtcctatgctgaatatatttttaaacatagtgataagaaaacattattagtccatgatcatgtctatcataggtaaaaataatgaaaagaataaaaggttttactttattagaggcagtttttgcaattgcggttacgattttatgtgcgcaaatactttttggactcgtaaatacacttagaaaaattaatcatcaaaaaagtggaataaatgaaattgcatatagttatgtacaagtaaataattttttaaaagaaagtgggcatgttgaagtaagtacaactggatcagacccaactaaaattattctcagaaaattttctgataaaaagaaaaagaagaatgatccaacttatgagacgtatgtgattgatttaagctcaaatgatactttaagaatgcggacagatgagggtggacatatgcctctattttttaaagttaaaaaaattagatgttctacgtcaaaagattcatttacaatcctgataactgaaaaagatggtagacaaagtgaaatgtattttaaaacagatttaccagaaaaaaaggaagtgaatccagctgatgagaaagaaaaaaagagttaatcgagtaaacgggagtgctttggttagtagtttactgcttattaatatctgtattacttttacgttaatgtaccagcatacttttactgaaaatatggaaagcaatctttctttaataaattatttctctaagtaataaggagtgcttgctagtatttgaggatacctatagaatattagaaggaatattaaagaaggaagaaaaatgcaaaaagtagaagaattgtatccaaaatttcagacagctattgagcatttacaaaaggctcttaatgtttctttttcatctgcattgacggaaacctttgataatttagaaaacggaaagatcaaagttgagtcaggtgctccagataaggaaactgtagctgaattgactgaagaatatcgtcaattagattatgataatttgccacgtgcattgaaagtacagatatttactttattagctttaaaggcaattactcaagatgctagtgactataacttaatgcctaccccctcagtagttgctacaataattgctttgatttggcaaaaaattgttcctactggtaaaaaaactgtagttgatccagctattgggactggaaacttactttattcagtaattagacagttaatacaagagaatcattctcaaaataattacaatctaattggaattgataacgaggaatctctcttagacttggctgatattggtgcgcatcttgaagatttaaagattgatttgtattgccaagatgcattagatccatggatgattgaaaaggctgatgttgtcttaagtgatctaccggtaggttactatccactagataataatgctcaacgctatgaaaatcatgcaaaagaaggacattcatttgcccatactttgttcattgagcaaattgtaaataatcttaagagagatggctttgcatttttagtggtaccacgattactatttactggcaaaggctctactgaattcatgacttggttagcaaaaaaagttaatattcaagctattgtagatttgccagataatatgtttttaagccaaattcagcaaaaatcaattttagttttccaaaatcatggagatcatgctgtggagcgggaagtactggtagctaaattagattcactaaaaggaccagaatctttagtagcatttaatatgaagttaaatgattggtatcataaaaataaagattaattttataagtatgtgaggtatatatatgaaaaaagttttagcagtaaattcaggtagttcatcatttaagtacaaattattttctcttgataatgaagaagtaattgcatctggtatggctgaccgggtaggattaccaggctctgtttttactatgactttagctgatggtagtcaacatgatgaacaaagtgatattgctaaccaagaagaagctgttcaaaagttacttagctggcttaaagaatataatgttattgattccttagaagatattgcgggcgtaggtcaccgtgtagttgctggtggagaagaatttactgatagtacagtaattactgaagataatctttggaaaatttataatatgagtgactatgcgcctttacataacccagctgaggcagatggtatctatgccttcatgaaagttttgcctaatgtaccagaagtcgctgtttttgatacgtcatttcaccaatcattagatccagttcaatacttatattctgttccttataagtattacgaaaagttccgtgctagaaaatatggtgcacacgggacttctgcacgctatgtatcacgtcgtaccgctgatcttttaaataaaccagttgaggacttgaagatggttctttgtcacttgggtagtggtgcatcagttactgctattaaagatggaaaatcttttgatacttcaatgggatttagtcctgttgcaggaatcacgatgagtacgagaagtggtgatgtagatccttctttacttcaatttattatgaaaaagggaaacatcactagttttaacgaagttatcaagatgttgaataccgaatctggtttattgggtctttcaggaatttcaccagatatgagagatattgaaaaagctatcaaaaatggtgataagcaggctcaacttacaaaagatatattcattaatcgaattgttcgttatattggtgcctacatgactgaaatgggcggattagatgttttagtctttacagcaggcattggggaacatgatgcaagtgtaagaaagcaaattatggatggtcttacttggcttggtcttgaatatgatgaagaagccaacaaagctaatcatgagagtgtgattactacaccaaattcaaaaattactgctatgattgttccaacaaatgaagaattaatgattgcacgtgatgttgttcgtttagcaaaattagataagttaaacaaataaggttaaaatcaaagttatagccttttaataaggactgtgatatcattgaaacatctggggatgttttgggattcgacaggcgtagattcgcgttgactgcgattcgtaggtcacgtctacgttaaaaacgtcacagttaaattataactgcaaataacgaaaattcttacgcagtagctgcttagtcagcctgcgtgatccaaagatggattgctcgtgtctatctacgggtcttaccatttaacgagctacgtttaactacttaccttaatagttagaaataagattcttaggttagttttgatagtttagccctgttatatggcgttttatcaaagcgaattttaagtaatataactatgatcgtagatgttaacgacgaaatacgtttggacaggggttcaattcccctcatctccatagtaaaaagcctgtaagttaaatacttacaggcttttttattatgtattaactgctatgtttaagattcaatagcagattctgttttgaaataaaactgataatcgtttaacattcagcactaataaaggattttcgctaaatctatacaattttttctaaattttatttatttttttataaaaagatgataggcttttagatgaaatgttaaacgcttaacatgtaggaggagaaaagatgttggaaaataaaaatcataaaaagatatctttaagcggaaaatctttgttaatgggaaccttgtcaacagcagcaattgtattaagtgcatcaactgcaaatgctgcgactattaatgcagacaatgttaatgaaaatcaaactgtagaagtaactgctagttcagtaaacaatgaaaataataagcaagtaactgaaaaagatagtgcagataaaagtactagtgatgtggctgaagatgctaacaccaagaaatcaaacgaaaatacagaaactacagaaaagaatactcaaacagttgttactaatgcgccagtaagtgatgtgaaaaatacaaacacagttaccgctgaaacacctgttgataaagtagtaaataatagtgatcaaaagacaactaatgctgcaactactgatactaaaaaagatgatgtaaaacaagttgaaaagaaagactcagtagataaaacaaatgctgaggaaaataaagatagttcagtaaagccagctgaaaatgctactaaggctgaattaaagggccaagttaaagatatcgttgaagaatctggtgttgatactagcaagttaactaatgatcaaattaatgaattaaataaaattaatttctccaaagaagcaaaaagtggtactcagttaacttacaacgactttaaaaaaattgctaaaactttaattgaacaagatgctcgttatgctattccattcttcaatgcaagtaaaattaaaaatatgcctgctgctaaaacacttgatgctcaaagtggaaaagtagaagatttggaaatttgggattcatggcctgttcaagatgcaaaaactggttacgtatctaactggaatggctaccaattagtgattggtatgatgggagttccaaacgtcaatgataaccacatttatcttctttacaacaagtatggtgataatgactttaatcattggaagaatgccggtcctattttcggtctaggtactccagttattcaacaatggtctggatcagcaactttaaataaagatggctcaattcaactttactacactaaggttgatactagtgataataatactaaccaccaaaaactcgctagtgcaactgtttacttaaatcttgaaaaagatcaagataagatttctattgctcatgttgacaacgaccatattgtctttgaaggtgatggttaccactaccaaacttatgaccaatggaaagaaactaacaagggtgctgacaatatcgcaatgcgtgatgcacacgtgattgatgatgataatggtaatcgttaccttgtgtttgaagcaagtactggaaccgaaaattatcaaggtgatgatcaaatttatcaatggttaaattacggcggtactaacaaggataatttaggtgatttcttccaaattttatctaactccgatattaaagatagagctaaatggtcaaacgctgcaattggtatcattaaattaaatgatgatgttaagaatccaagtgttgcaaaggtctacagcccacttattagtgcaccaatggtaagtgatgaaattgaacgccctgatgttgttaaattaggtaataagtattacttatttgctgctactagattaaaccgtggtagtaacgatgatgcttggatggcaactaacaaagcagttggtgataacgtagctatgattggttatgtttctgataacttaactcatggttatgttccattgaatgaatctggcgttgttttaactgcatctgtaccggctaactggcgtactgcaacttattcatactatgcagttccagtagaaggaagagatgatcaacttttaattacttcatacatcactaatcgtggtgaggttgctggaaagggtatgcatgcaacttgggcaccaagtttcttgttacaaattaatccagataacactactactgttttagctaaaatgactaaccaaggggattggatttgggatgatagtagtgaaaatccagatatgatgggtgtacttgaaaaagatgctccaaatagtgctgcccttcctggagaatggggaaaaccagttgattgggatttaattggtggatacaacttgaagccacaccaacctgtaactcctattccaaatgtaccaactactcctgaaaccccaaccacaccagataagccagaggtaccaactacccctgaagttccaaccactccagaaactccaactccagaagctccaaagaatccagttaagaaaactagtcagtctaaacttccaaaggctggagataaaaatagctttgcagcagttgttttaggtgctgtaagttcaatattaggtgctgttggtttaacaggtgtttcaaaacgtaaacgtaataattaaattaaaaaagatgagttccgttgaacttatctttttttgctataaatataatttatcctaggatgaaaaactgtaaattttctcaaaaatagcttttttctataatgagttagaaaagtaatagagtgctacctatctataggtcagaagtatatttaagtatgcttatcaaatattagacaattacttttcataatttagactagatgtttgaaagctttaataaaagaggaaatatatgcaagaaattaaagaaaaatattttgaaggagaaagagccctgtatggcctttcaaatacaattttaaaaaatgttacttttggtgaaggagaatctcctttaaaagaaaccaaagatttagaaataaaagccactatttttaaatataaatatcctttatggtattcaaataacattaatatcactgatgcgatttttgaaacaatgtctcgaagtggaatctggtataccaataatatttctattaaaaattctaatctgcaagctccaaagctatttagaagatgcaaaaatatcacattagaccatattttcttttccaatgcagaagagacaatgtggacctgtgaagatattgcaattaaaaatacagaaattaatggggattattttggaaaagatagctctaatatttacatggaaaatgttagagtaattggaaattacgtatttgatggagctaaaaatattgtatgtaagaactgtagttttgtttcaaaagatgctttttggaattgtgagaatgtaactttgattaattgtcagatagatggggaatatttgagctggaatagtagtcatattacgtttaaagattgtactattgagagtgatcagggactatgctacatggattatgttactttagaaaattgtatcttgaatcaaactcctttagcctttgaaaaatgtagtaatataaaagcaactataaacagcaaaattactagtattaaaaatccaatttcgggaataattaaggctaaaaagatagaaacggtaattattgatcctactaaagttgatcctaaggctacaaagattatttttatagaaccagttgatagagaagtatccgtttctgaccaaaatcaagaaggtgaataaatttgaaatatgattttaagacagtagtaaatcgaagacatacggattccgtaaaatggaatgtgcaagataatgaactgccaatgtccattgcagacatggattttaaaacagctcctgaaattattttggcaatgcaagaaaagcttaagcttggggtctttggctatgaagaagcgggagaggactattttaatgctgtaagcagttggtatcaactagagcatggagtcaatgctgatccaacatggatgatctttgtcactggagtagtaccagcaatttcatcaattgtcagacgcatatcgcatattggggataatgtattggtgcaagagccagtttataatattttttataattcgattgagaataatggtcgtcatgtattatcaagtgatttgagctatcatgatggaaaatatgagatcgattggcaagatttagaaaataaattagctgatccattgaccacattaatgctcttctgtaatcctcataatcctacaggaatagtgtggtcgcgtagtgaagtagagcgaatagcagctttatgccaaaaatatcatgtagtgttgttatcagatgaaatccacggtgacatagttagaaataatgtaaaatatacacctgcattttctgttacccaagaattgaaaaataatgtaatcagcctcgtatcaccaagtaaaacgtttaatgttgctgctcttcacgctgctacggtaattattcctgatgagaatttacgcatgattgttagtcgaggactaaatagtgatgaattggctgagccaaatctaatggcaattccggcaacaattgctgcttatacagaaggatttaattggctgcatgatttattagatacaattaatgagaattttatctatgctgaacatgaaataaataaaaacttgaaaaatgtaaagattgtctctggacctgcaacttacttaatgtggttagatgtaagcgaaatttcaaaagatagtaaaaaattagcagattatcttcgaaaagaaactggcttaattgtttcagctggcagtatttatcggggtaacgcgagtcaatttttacgtcttaatttggcctcaccaatatcgatggtagaggatggaattgaacgattgattactggaattaaaaatttttctaaaaaatagttgaaagtggtttcaaaattatctcaaaaagatatatacttttattgaggtgatttttttatggaaccattatttttaacgccatactttagaccaaaaatttggggtggtcgtaaattaaatactgttttaggatatgatattcctgatggaaaggttggagaagcctgggtaatttcaggatacaaagacgatgcttcaattgttaatgcaggtccatttaaaggaaagacattgcgagaagtatatttagagcatcctgagttatttggtaatccaaaagcaaaagaatttcctttactagttaaattcttagatgcaaatgataatttatcagttcaagttcatccagatgatgaatatgccagaattcatgaaaatgattcagggaaaacagaaagctggtacgtgcttcatgctgaaccaggtgctaaacttatctatgggcacaacgctaagagcaaggaagaactagaagattggattaaaaatggaaagtggtcaaagcttttacgctatgtacctgtaaaagaaggagactttttatacgttccttctggtactgtacatgctctaacaaagggtactatggttattgaaacccaacaatcaagtgatgtaacgtacagattatatgattgggatcgcgtagataagaagacgggaaagaagagagagttgcatattaagcaatctcttgatactattcaagtaccacataaagatccgaagctaaaaattacatcagaaacagtaggagatgctaagattactacgctagcacaaccaccgatgtcaccacatttttatttatggcagattgatgttgatggagattttgcttggagtttaaatgatcatccttatcttctagtatctttaattaaaggtagcggtaagtttattgctgatggtaaagagtatgacattaaattaggaagcaactttattattcctaacgaaatgaagaactttagttttagcggtaatttacgtttagtaatttcagctccgggtaaagaataaatttaagtgaatggagttggtcaaatgatttatattggttgcggggtaataatgtttgtaatcggggtcatttggctgattgctccttcgcccaaccctaatcgaatttatggatatatgtcctatttagcttcagttaatgaagcaagctaccagtatgcgcaaaaagtagcccgtaattattttatgttatttggtttgatccaaactcttttaggattaggaattcattttttgcattgggatcgctactttttaatttggttgcttactttttatttgtttatcttggctccaataatcttaactgaaaagaaattgcaggcttttttacgtgctcggcatgagttgccacatgattatattgaatcggataagattaaacatactagagtaaaaggatttaaggacaaataatgctaaagatattaatggttgaagatgacaattctgttgcggaaatgatgaaaatgttctttagtaaagagcagtgggacgtagatatagctaaagatggagtagaagctgttgaaatgtttaaggcaaatcccagctcttatgatatcgttacgctagatcttaatttacctaaaaaagatggtatggaagtagctaaggaaattagagcaatttctctctcaataccaataattatgttaacggctagagactcagaaactgatcaaattttaggattggggattggtgcagacgaatatgttactaagccctttagtcctttggccttaatagcacggatcaaggcgctatatcgcagaagccatctggaaaaggatatgcatgcttctaatggtataaaatatgatgtagtaactaagcatttaaaaatttcgaaggaccgtcgagaagtacgatttgatgataaagtggttgaaggtttgacccctaaggaatttgatttactttatactatggctcaaaagccaaagcaggttttttcaagagacaaacttttagagctagtgtggggatatgagtttttcggtgaggaaagaactgttgatgctcatattaaaaaattacgtcaaaaattagagaaagctggtcctcaagtagttcaaaccgtttggggtgtgggctacaagtttgatgattctgaggtatagaagttgaagttattctatcaagaaattttaggttttttgctagtaataattactagtattgtaattattggctcatcaactattcattttgcgactattcaagcctattctcaaagttacactcgcttagaagaatatggaacttcgattggaaaactagctttagcgaaagataatcctaaacatgaattagatgctaaatttttgaaaaatttacaggtagtaatggaaggcgaagatgtaaatcttcgcatttttaataataaaaatagacaagtttatccagaaactacaatgaactgggctttaccgcaaaagttatttaagcaattaaagaatggtaaaaagattcgcattagaaatgatcatgaggatggacgagtaagttctttttcaaataaagatgcatatactagtgtaattgttccctggcgtagtaaaggaaaactggtgggagtaatctggatcggttcacgtgtgcaaaatgtggaacaaatgattgtacgagaaaagcataatctgttaacagctttacttagttctttagttattggcgggttgatcagttttatcttgtcgtactatatttcaagaaagattaagcttttatctaatgctactaagaaagtcgcacaaggggactttaatgtccatctaaaacacaaggatactgatgagattgatgatttagcacgtaattttaatattatggttaatgctttaaaagaatcaaacgatgaaattaaggcacaagaaaagcgacgagagcaatttatggctgatgccgctcatgaaatgcgaactccgcttactacaattaacggtttgttagaagggtttgaatatgatgctattcctgaagaggccaaacctaagtctattgctttaatgcacagtgaaacaaaacgattaattagattagtaaatgaaaacttagattacgaaaaaattagaaataataaaattagtctgattcaatcaaaattcaatgcgactgaagttttagctaatttattaacacaaatgaagcaaaaagctgctcaaaagaatgatgagttgattttaaattgtccgcagcaagttgaagtttatgcagataaagaccgtttcactcagataatggttaatctagttcaaaatgcattacaatttactgaaaatggaaagattacaatttctgctaagaggattgagcatggcgcccaatttaaaatagccgatacaggaattggaatgaataagaaacagatgaaatacatttttgaaagattctataaggcagatccatcgagagcaaaaattggctcgggagaatctggcttaggactttcgattgttttatctcttattaaacagcatggcggtaagattaacgtcgattcagaacctggaaagggtgcaacgtttaccgtaaccttatatgataagggttataaggaatttattaaagactaacaaaaagggtagtacttaaaaatataagtactaccctttttctatttatcgagattatcttttcctggagaactgttttgattatttttatttttttcacttgtagctgattgaatattctcaggaatattattaatttcatccttatcgatttctgaagcatcagttgtataaagatcagtagtcgttcccttgtgctgagaataaagagaagtagatttgttacctaattcttttcttaattgcaacattttttgatagttaattttgtagtcgaattcgttcggattagttggaataaagccagctggagtgtagaaccgtagcagattatgattatttaacaaatcggaatagtgaagagaggtgcgtccatattcaactaatttagcaatttcaactttttgctttttattaaatttagtgatcttttccctagtttgatgattgtaaattgtccctttaatacctttaccgccaataattatatatttcggagtaacaatagtaccgtttctaaacacaactacttgtcgatattgtttggagaataaatcctgaccaaattgaatataatttttatttgaaattcctaaaagatgaagtaacgttgggagaacatcaatttcaccgctaagcttgttatcaattgtccccttaattccattcatatggatcatgaaaggactttttgaagttctgttgtgtcataagatgtccatttactaaaatctttacctaatactggtgccagagcagataattcatcatctgaactaccaacaccgtaatggtctccataaaggataaccatcgtatttttatcaaggccactcttttttagataatcaaagaactctttaactgattggtcaagataatgcgctgtctcaaagtaattattgatggttgtatttgaagtatttgtagtagtaaagttatcatctttatcttcttgatcaagttgaaatggaatatggttagtaacagttaaatacttaacatagaatggttgctgaatctgttcaagatacttaatgctttcactaaacaataacttatcttttaggccatatccgattttgtcgttatttttttgagagaaataatttgcatcgaagaaatagttatatcctaaatttttatatacttcatttcgattccaaaaagttcctgtgttaccgtgaaaaacagccgaagtatagccagtttgacgaagaatttgaggtgcaccttggaaagtattttcagatcctaatgatgaaaatagggaaccatctgaaataccatatgttccagtttcaagcatattttctgcatcactggttcgtcccaagcctacttgatgataaaagttactaaagctaacggtgtctttattatgatagagtgagttaagaaatggagtaaccttcttgtccattaacttttaatccaattagaaattgttgaaaactttctaggtgtaggacaatgacattttttcccttggctttaccaaaatattctggatttgcttttgcataatgctttttagtaaagtcgagtacttgattaatatcttctgcattagcatttttcttaacttggtttgattgtgcactttttaagaggtcatatactgaataagtatcaagtccaagatatttaaccacgtaagagcggtcgaatgtatttcttaataatcgtggacgtgaggtttcagctaaaaacatatttaaagttaacatgaaaacgccaaatgatgagacagcaaatggacgtttaaatccatacttacgtggatcaattttgataactttaataatcaataagataatgataattatgagatccagccaaagaaaaatatcgctgggatgcagtaaagcaaccgtactctttcctagtccttgtgatacttttccggtattttgaatagttttactagttaaaaagtctgaaaattgacgataataaatgacatttgcaaaaagcaaaatcgtatttattgtgtctaaaactagcattgcaatataagagactaatggcttagagaaatagagccctaaactaagaataataatgcatgtgcctaaaggcgttaaccagacgatgaagtgctggtatgggtcacttaagccaagcttaaaatcaaagtaagccgcatacatatattttgcccaaaaacaaagtgttaggattgttaagaaaccaattctagtttgccagaaattacgttttgttttattcacgcttcactactccttttaataaggaatattttactggtaatttcaaaaaacgacaaacttttgttaaaggtttgcgattttttaatattttgaaaaaaatcatctttcatggagatctttacgttataattaagccaaaattacggagtcggttaggttatgctttttttacaacccttatatgaatatatttttcaccattatgcagcgcatattaatcactttgccttaattaagttgattttgtatagcttagataagacacttttttactttattatttttgtaattattcgtttatgttggctgttattggtgagacatagaagaaccctgaagtccgaagcttgtgtatggatatttagtttttatataattttgctcttaatgctgacagtatttagagatacatattttccatggcagttgacatttaatttccatcgtagtctaagcgatataaacttagtatttatgaaagaaacgctgaaattgactcatggtcagagtttacttgactttttttataattcgcttggaaatgttttatggttcatcccgtttggttttttatttcctacagttattcagaaaaaaagtatggtgggaaccattttggccgggggatgtttatccgtaattattgaatctttgcaatttgttttagaaactggtgtaagcgatatagatgacgtattttttaatgtttgtgggactataattggatttatattatatcgaattatttatagattcttataagaaaaaactctagttttatgaggaagtaactgctaaaataaggtttgtatgtgaaaaagttacaaaaaaaggaagtttaaataatgagtaaagttgttcactttgatgcaagtaaattaactccttttgttcatgaaaatgaattaaaggaaatgcaagcaatggtaactgctgcagatcaagaattacgcgaaggtactggcgcaggtagtgacttccgtggttggattgatttgccaattaattatgataaagacgaatttgatcgtattaaaaaagcagctaaaaagattcaaaatgattcagaagttttagttggtattggtattggtggttcataccttggtgcccaagcttcaattgagttcttaaatagctctttctacggtagagaaaaagaaaagtacccaactgtagtattttgtggtaattctctttcaggttcatacctttacgatttgcttgaatggttaggagataaggacttttcaattaatattatttctaagtctggtactactactgaaccttcaattgctttccgtgtattgaaggataagttaatcaagaaatacggtaaagaagaagctgctaagagaatttacgcaactactgaccgtgctaagggtgctttgaagactgaagcagatgcagaaggttacgaagaattcgtagttccagatgatattggtggtcgtttctcagtattgtcagctgttggtttgcttccaattgctgtagctggtggtgacatcgatgctatgatgaagggtgctgcagatgcacgtgctgcttacactgatccagatgttttaaaggacagtccttaccaatatgcagcaatgcgtaatatcctttaccgtaaaggttacactactgaattacttgaaaactatgaaccatcattaagaatgtttggtgaatggtggaagcaattaatgggtgaatcagaaggtaaagatcaaaaaggtatttacccatctagtgctaacttcactactgaccttcactcacttggtcaatacatccaagaaggtcgtcgtaacttaatggaaacagttattcgtgttgaacacccaacacatgatgtaactattcctgacgataaggaaaacctagatcaattaaacttcttatcaggtaaaactatgaattacgtaaatgatcgtgcttacgaaggtgtagttctagctcatactgatggtggtgtaccagttatgactgttgatattgaaaatcaaacagctcatactttaggttacttaatctactggtttgaattagctgtaggtatctcaggctacttaaatggtattaacccatttaaccaaccaggtgttgaaagttacaagagaaacatgtttggtcttttaaacaaacctggttatgaagacttacatgatgatttaactaaacgcttaaaataaatctacttagcatatttttatagtatgcagatcgaatatagctagataatagttaaagaaagggtagaggctaattgcctccactcttttttattggagaaaaaatgaaaaaacagacagaaaatacattggctgtcctagcaacagcgttcatgtcctttgttggaattttaactgaaacaagtttaaatgtaacttttcctgcgatgatgaaacaatttaacgtatctttagatacaattcagtggactacaactggatatttattgatgattgcaataattatgattagttcttcttatcaaaatgagcgttttactgctaagcaattgtttgtaacagctgccattgcatttatggttggaagtattatttcagcatttgcattaaatttttatattttattgttagggcgtttaatttcagctctaggtgtgggtctctgtacaccaatgatgtttaatttgattgtagaagtaatgccaagagatgaatggggactatatatgggaattgctggtttagtagtagcaatggctccgactctcggtccagcttttgggggaagcatttcttattaccttaattggcgctggatttttataattgctacaattttcgcactattagtttttgttgctggaatttttgtgattggaagctaccatccagtaaaaaagaaatcttttaattggctggcttacgcaattttaagtgcagggatggtaagtttagtaatcggtgtaaatcaattgagtaagggactgaaaaattggcgtctatgggttttattaatattagccgcaattttattcatcctatttgtcagaatttctaaacgttctactagtaagctacttgacttatcagtttttgaagatagggcatttatttttggagcatgtgcttattttttacttcagtttattaatattggagtgagttttgtcttacctaactatatccaaatcgttaataaacaaacatctttaattgggggactcgttttacttccaggcagtattgttgctggactcctgaatccttattttggtcgactatatgaccgcctaggagcaaaagtgccattatatggtggcgcgtttttaatggcgctagggagctttttattagctaattggggcttaagcttaaccacatggatgattatttgtttttatggaattttgatgttaggacatcgtatgtcctttagcaatacgatggcgcaaagtttaaaaatagtcgataaaaatttgaaagcagatgcaacagctgtttgtcaaacagcacaacaattagctggttcaatggggactgcaattttggctgcaattatggcggtgtttcaaaataagcaaacagagagttatgctgctttaactgctcaaggaagtcgaatcgcattctatttcacttttggtcttggaattttgattttagtgtgtgattggtttatgtttagactagataaagaaaaacctacaagagaagaaagtgtaactaaagatgaataataattttttagctatggaaaaaaacatacacgattttgctcaagagctttattttagaaatgaagctgcaactgatttagtggaaaaagatgaacaaaaagacttattacattttgatagaagcggcgttgaagaattacaagagattgctggcattttgaaagatttttgtcagccacaagttcgagctattttagaagttagtgaagacgcaaagaaaaccgacctagatcagaacttattgcgggatcaatctcatcagttacttcaaaattatgctaacctagaaaagttagttgcttatgtagagaaacaagcagaacaaaaaaataagaaattgagtaagcaatgggtggagctaaaagaaaatctagctaaaatgaatattaatcaaatagaagatattgagaaaactacaaaaagtatgtcataaagagtgaaaataagtgatataattgaaaagctgcatcatggtgagtaagacgtgatgcagctttttttcactttaaattacttttcaaagaaaaatagcaatgtaacttgacagatttacaatattcaattatatttacatatgttgaatttgcccgttggtcaaatggttaagacgccaccctctcaaggtggagttacgagttcaattctcgtacgggtgatatactgagatatagccaaattggtaaggcacaggattctggttcctggatgtttcggttcgagcccgaatatctcaatacgttaccgtcagatcaatgatctgacggttttattttataatccaggtggtaaggatgatagaattttttaagactcaacatttggttgaaagtatggttagtgagcggattgttcctggagtaaattatgcctttattaaaaaaaagcaagtatttacctcaacagttggctttgctagtttaatacctaaagttgagcaacttagcccttttgctctgtatgacttagctagtttaactaaggtgttaggaacaactaatgtttttttgaagctgaaagaagaaggaaaacttaattttacagaacctcttaaagattttattcctgaatttaaagatgaacgtattcgccttagtgatttgttaacccatactagtggaattcggggatggattcctaatcgtgatgaattagctgcacctgatttattgaaggcgatcattgggttacctgttactgatgaatttaaaacaaaaatgcgatatgccgatactaattttattttattgggattagttcttgagaaaatctatgggctacctgtgcaagatatcattatgcaggaaatcattttacctgctaaattgaaagagacaacttttcatcctaaggcaagtgagtgcgttcctaccgctttaactgaaaagggaaaaatgttacgagggattgtacatgatcctaaagctcgggtattaggaaaagattgtgggtctgccggtttatttgcaaatctggaagatttaataaagataacccaggcttatttagggctacgtaatgacgttttacctctacagcaagataccttagctaatttgtttcaagttgaaactcctaagaaagtacatcctcgttcttggggatgggatttacggtttgatcctgttgaccaacacccattgatttaccatactggctttactggaacatttatgctaattgatcgacttaatcaaaccgcaatgattgttttaacaaatcgaatccatcctagcggacataatcatatttttcttgcaatgagggaaaagattgttgatacgtttttgaaagaaaatgtctgtaaaaattaaaaagggataatgtcaattgacattatcccttttatgttacatacctgctttaataattttcttttcacccattgttttacgaagtgaaagcatagcagtataagtggctaaaatataaactttcttagttggtaattttgaaatttcatctagcaaagcttcgttattagtagcagttgtcattaaccccggctcaaaacctgaaacttccagtctgaatcccatatcatgccaacgttttccaccgactattacttttttgatttgatctttgtttaaaccttcatagtctgcatcccagatccaggatgtatcgattccgtctgcgtgatttgcatttaaaagagtaactaaagaatagttatctttttcagtatttaacatatggagaacctcatcaagcccaactggatttttaactaagatgagatctatttccttatctgcataattaatcaattcttggcgaccaaaaattcgtttgttttcagcaaaactttgggctacttcttcttcacttaaaccaaattcacgcgctacagaataagcagctagagcattatagatattataggtaccaccgataccaatgctgtactctttttcacccattttgaattttaagctatttggagtttgatcaataatttgatttacactataggttaattctggacgatggtagccacaattaggacagaaatagtctcctaagtttgcataaatacgttcgtgataatgcaagatatgatcgcacttaggacataaaacaccatcagtatttacgggagccttgaagtcattttcaggcttgtcctccggaagtttgaagccatagaatacttttttattaggtaattccacggatgaaaaaatacttgcatctccgttagcgataatagttgcatcgggagctagtttaattccgtcgacaatcttttggtaggtagtataaatttcaccgtatctatccatctgatcacggaaaatattagttaaaacaaatacgcttggatgtagtaacttggttaccatttttacatttgcttcatctacttctagcacagcaattttcttttttgctcttttattcttgtgagctaaaaatgctgtaacaattccttgttgcatatttgagcctgatggattagttaaaatatcaccatatttcttctttaatgcttccacgattaaagcggttgtcattgttttaccattagttccagtaacaatgattgtctcatagccttttgctaatgaatttaatacttcaggatcaattttcatggcaaatttcccaggaaaactcgtcccgccctttaatacgttatgaagaaaccagtaagatgatttaccagctaccttagcgatgcctgattttaaattcatattattatccctcactttaaaactaaattttactatagcatatagagaaaatgaagacgacctttttatttttacctgcacgatttttaaatttactttatactaattaaggcaatattagtgaagttacataaacttaacaatggaggaattttgcagtggctcagttgttttttcgctatggtgcaatgagtagtggtaagtcgattgaaatactaaaggttgcccataattatgaggcacaaggacgaaaaattgctttaatgacgagtaatgtagacgatagaagtggagtaggaaccgtagcttctagaattggtttacatcgtaaagctgtacccataagtgaagatttagatttatttaattatgtttcagaattgaataaaagtgatgtggagtctggcaatggtagggtggcttgtgttttaattgacgaggcacagtttttaaaaagacaccacgtattagaatgtgccaaaattgttgatgaattaaaaatacctgtaatggcatttggtctgaaaaatgattttcaaaatcatttgtttgaaggtagcgaaaatttgttgatttttgctgataaagtagaagaaatgaagacaatttgtcactattgcggtcataaggctacaatgaatttacgaattaattctggaaaacctgtttatgagggtgaacaagttcaaattggcggagatgaatcttattatcccgtttgtcgttttcactattttcatcctaataagcaaagataaaagataagagaattaagaaaggataataattatggataaagtgatggcccaattggaaggattagttgcccattatgaagaacttcaagaaatgatggctgatcccgaagttattaacgatactaagcggtatatggaaatctctaaagaagaagccgatatgcgtgaagtagtacaaaaatatcgcaaatataagtcagatattaaagaaattgatgataataaagaaattatttctactgaatctgataatgacttagttgagatggcgaaggaagaaaattctgaattagaaaaagaagttgctgaattagaagatgagattaagatcttaatgcttcctaaagaccctaacgacgataaagatattattatggaaattagaggagctgccggtggggatgaagcatcattatttgcaggtgatcttcttagaatgtacgaaaaatacgcagaaactcaaggttggaaagtatctttaattgattctgagccgactgaagtaggcggatataagcgcgttgccgttatgatcacaggtgataaagtttactcaaaattaaagtatgaaaacggagctcatcgtgtacaacgtgttccagtaactgaatctcaaggtcgtgttcatacttctactgcgactgtagccgttatgcctgaatacgaacaagtagacatcgacttagatccaaaagatattcgtgtagatgtttaccgttcatctggtgctggtggacagcatattaacaaaacttctagtgccgtacgtatgacacaccttcctactggtattgtagttgctatgcaggatcaacgtagtcaacaacaaaaccgtgaaaaggctatgcaaattttgaaatcacgtgtttatgactactatgaaagtcaaaatcgtgatcaatatgacgctaaaagaaaagaatctgttggtacaggagatcggtctgaaagaattagaacctataactatcctcaaaaccgtgtaactgatcacagaattggtctaactttaaacaagcttgatcgaataatgaacggcgagttggatgaaattattaatgcactcgttctttactaccaaactcagcaattagaaaagatggctgaagaaaatgcctaaaagtctaaaaaaaataaaagaaactgtgttaaatgataattctgaaattcgtccagaggatattgattacgttctgggagaaagattaggctatacaccttcagaatttgaattacacattaatgatgaattaactccggaacaagaaaagcaagcattaaaagatatgaaaaaattgcgtcgaggaatttctccgcaatatattttgggatacgcttggttttatggctacaaaattttagttaaccgtggagttttaattcctcggtttgaaactgaagagttagttaaatgggcacttgaaaatattgaatctggtaaaaagatccttgatttaggaactggttctggagctattatggttgccttggtaaagcaagctcagaaacaggggattcagaatttgaatctatacgcaagtgatattacagattccgctttacgtgaaagcgaagaaaatttcttaaagtatgatttagatgttaaaacccgtaaggcaaatgtattagtgggcttagaaaaattcgacatgattatttctaatccaccctatattaagactagtgaaaagaacttaatggataaaaatgttataaaaaacgaacctgatactgccttatatgggggagaagatggtctagatttttatcgtaaatttgcaaagcaagttcagtcacatttaaatcctcaaggacaatttttcttagagttcggttttagtgaaaaagagcaattaaaagaattatttgagactgaattaccagattttgaaattgaatttaaggatgacttagcaggtaagccaagaatggttcatggaaggtggaggaagtaatggaaacgaagattttcaataaagaacaaattcctgaagcagttgccctgttgagaaaaggagaattagtagcttttccaactgaaaccgtatatgggcttggggcattagcaactaatgaaaaggctgttaagagtgtatatgcagctaaaggccgcccaagtgataatccattaattgtaactgtgtctgatgaacaaatgatggaaaactatgttagtgaagtaccagaacgtgctaaaaagctaattaagcacttttggcctggtccattaactattattctttttgtcaaagaggggactttgccagatgctgtaactggtggtctcccaaccgcagcatttcgctgtccaaatgatgacatgactcatgatttaattagcggactaggaaaaccaattgttggtccatctgctaatacttccactaagcctagtccaacaactgcagaacatgtttttcatgatttaaagggaaaaatagcggggattattgataatggtccaaccgagattggtttagaatcaacaattgttgatttgtccgttgaaaagccaacagttcttcgtcctggagaaattacgcctgaagagatttcagcagttctaggagaagaagttttgatgaataggggaactacgcagactaagggtgtgccaaaggctcctggtatgaaatatcgtcattacgctcctagtgctcctgttttaattgttgataaagaagaagatttttcgaaaatccaatgggatgatgagactggtgtagctgctttggatgaagttcttgaaaagatcgatagtcctaataaatatagtctaggcaagaccattgataaggcagctcataatttgtttggtgctttaagatattttgatggtgaagataagattaagcgcatttatgtccaaggttttgaccatggtgcaattagtgctgcttacatgaatcgtttaaacaaagctgctgctggccaccattttcattaaaaataaaaaggcatgtagaaaaacatgccttttttcgtatgatttaggaaacatttatctaataatttgttaaaataatgaacgaagtattatttttaaaataggaggccattatgggtaagtttactgttttgaatcacccgttgatccaacataagttgacaatcattcgtaagaaagatacaggtacaaatgaatttcgtcaaattgttggtgaaatcggtggactcatggtttatgaaatgacacgcgatttgccattgaagaatgttgagattgaaactccaattggaaagtcaactcaaaaagaattagcaggtaagaaactagttatagtaccaattttacgtgctggtcttggaatggttgatggtgttcttcaaatgatcccatctgcaaaagtaggacatatcggaatgtatcgtgatgaagaaactctaaagccgcatgaatatttcttcaagatgccaccagatattgaagaacgtgaatgtattattgttgatccaatgcttgcaacaggtggttcagcaaatatggctattgaagcattaaagaagcgtggcgctaagaatattcgtttagctgttttagtggctgctcctgaaggtgtaaaggctgtacaagaagcaaatccagatgtagacatctatgcagcagcagaagatgaaaaattaatggataacggttacatctacccaggtctaggggatgcagggggatagattgttcggaactaagtaattttactcaaaaatattttgaaattgaaatttttgggtgttatcatttttagtgtgtttgaggtattcagcacaagaagggaggtcacgaagtgaatgagaaatctgtagtcgttaatgtattcggcttaaatttcaatgtaactaactgcttagggggaacgttagtcgcaattgcggttttctttcttgtttggtatttaggacgtaatgtttctttaaaacctaataaaaagcaaaatcttttggaatatatgattgattttacaaatgggattgttaaggataacgttgcggacgtagatgcacaaaagcacctatctttatatgcctttaccctattcatgttcattttctttatgaaccagttaggtttgttctttgagttttcaattaatgaccatatccttgtcaaatcaccaactgctaacccattaattactatgaccatggcaatgatgacattgcttttgtcttataactttggtgttcagaggtttggtgctaaaggttattttgcaaattatgcaaaaccagttggatttttacttccaatcaatattattgaggaattcactaatttcttgacgttatcactacgtctttacggtaatatttatgccggtgaagtattattaactttaatcggtaatcgttttgcaaagagtgcgggttggtttaccgtcatcgcttcggttccactaactttaatctggcaaggcttctctgtctttattggctctatccaggcatatgtattcgtaactttgtcaatggtatatattggtaaaaaggttactgaagaataattttacggaggtttttctatgaaatatttagctgccgcaattgccgctggtttagctgctttggctgcttcctacggtaacggaaaagttatttcaaaaactattgaaggtatggcaagacaacctgaatctgctaacaaccttagagcaactatgtttatcggtgttggtttgatcgaagctgttcctatcttagctatcgttattggcttcttaattctcttcctgtaatttgcgttttaagaacaagatcgtagttacgagaaagaagggttgagacatgcaatttatgtttgcagccttaaaattagagttaggtgacacgctttactatcttttgatctttgcagctttgctcctcttagttaagcactttgcttggggccctgtaacaaagatgatggaagaacgtcgtcaaaaggtaataagcgaccttgatcaagcagaaagtgatcgaaagaaagctgaattgcttgctaatcaacgtgaagctgccttgaaagactctaaacaagaggcaacacaaattctttctactgcaaaaagcaatgcggaaaaaactaagaataatattattagtcaagctgatcaagaagctgccgcaattagaaagagagcatcagaagatgctgcccaagcaaaaactgatgcactcaatgaggcaagagatcaagtagctgatatttctgttgctattgctgaaaaagtaattagcaagaatttatctgctgctgatcagaaagacttggtagatcaatttatcaaggggctgaatgactaatggctttaagtagagaagaaattgcttccagatacagtaaagctttatttgcttatgcacaggatgctaatagtctggatgcagtccatgaagatatgaatgtattgcttcaagtagctaaagaaaatcctgatatgctgcgtttgttaagcgatccaattattcgaaagaatcaaaaagaagaattcttatccagttttagcgataagttttcaagtgaaactaagaattttttggatttcttattagaatatcgcagatttgaatctttaactgcaattattgaggcatttaatactctttatgatgaatataagaatattgcttctggtactgcagtaagtgctattaagcttaatgaagatgaattaagtcgaataagccaagcctatgctaaaaagtatggctttaaagaattgattctaacaaataaagttgatccaagtatcttaggaggtattatcctcaaagtcggggatcgcattattgatggttctataagaactcgattgcaacaaattcgtgagcaattaattgaaaatagataaaagaggtgaaaccattgagcattaaagcggaagaaattagcgctttgatcaagcaacaacttgagaaatatgatgataagctcaacgtcaacgaagttggtactgttacctacgtcggtgacggtatcgcccgtgctcacggtctaaataacgtattatcaagtgaattattacaattttctaatggttcatacggtattgcgcaaaacctagaagccaatgatgttggtatcatcatcttaggtcgctttgacgatattcgtgaaggtgatcaagttaagcgtactggtcgaattatggaagttcctgttggcgatcaattaattggtcgtgttgtgaacccattaggacaaccagtagatggtttaggtgagattaagactgataagactagacctattgaaagtaaagctcctggagttatggatagacaatccgttaaccagcctttacaaactggtattaaagctatcgatgctttagttccaattggtcgtggacagcgtgaattaattattggtgaccgtaagacaggtaaaactgctcttgcactagatacaatcattaatcaaaagggccaagatgttatttgtatttacgttgccattggtcaaaaggaatcaacagttaaaaactctgttgaaactttaaaacgatttggtgctatggactacactattgtagtagaagccggtcctagtgaaccagcaccaatgctttatatcgctccatatgcaggaactgcaatgggtgaagagtttatgtacaatggtaaggatgtattaatcgtatttgatgacttgagtaagcaagccgttgcataccgtgaaatttccttacttcttcgtcgtccacctggtcgtgaagcttatccaggtgatgttttctacttacactctcgtttactagaacgtagtgctaagttgaataagaaacttggtggcggttcaatgactgccttaccatttattcaaacccaagctggggatatttcagcttatattccaactaacgttatttccattactgatggacagattttcttggaagctgatctattctttgctggtacacgtcctgccattaatgccggtgaatcagtttcccgtgttggtggtagcgcacaaatcaaggctatgaaaaaggttgcaggtacattgcgtgtggacttggcatcatatagagagcttgaaagttttgctcaatttggtagtgatcttgatcaagctactcaagctaagttaaatcgtggacgtcgtactgttgaagtattgaagcagccactacataagccacttcctgttgaagatgaagtattaattctttatgctttgacacatggctttttggatgcaattcctgtacctgatattcaacgttatgaacttgaattatatgattactttgcaagtaactataacgacttacttgatgtaatccgtactacaggagatttacctgaggaagataagcttaatgaagctttaaagaacttcaacgaaggtttttcaatcagtaagaaatagaagaggaggttttttcattggcagaatctctccttgaactgaaaaaaaagattgcttcaattcagaaaacaggtcaaataactgaagctatgagaatggtttcaggggttaaattgaatagaactgaaaaacttgatcaagaatatactatttataacgataaagttagagcaaccgtttctcatctgatgagttcacaaattgtgaatcaattaggtaaagagacaaatgaatatagtgaatttagcggtcaatctaatattgattatagtagtttcttcgatttaggtactttagcatctttagttcaacctcgtaaagaaatcaaatcgactggttacttagtaattagtggagatagaggtttagttggttcttataacagtcaagttattaagaatatgatgagtatctttaaagatgctgatgcccaaaataaagatgttaaaattttggcagttggtagcgttgcagcacaattctttaagaagcaaaatcttaatgtggtatatgaatatagtggggtaagcgatgtcccaacttacaatgaagttagagatattgttcaaaccgctgtaaagatgtacttaaatggcgtttatgatgaactttttgtttgttatactcaccacgtaaatacgttgacttctgcttttagagtagaaagcatgttaccaatttctgatattgatattaatcataaagaaacaatgccaaaagactacattattgagccagatattgattcagtattgaagacagttttacctcaatttgctaaatcaatgatctttggagctattttggatgctaaaactgctgagcatgcaagttcaatgacagcgatgcagagtgcatctcaaaatgcagatgatgttgtttctggtttgaagactaaattgaatcgagcaagacaggcacaaattactaccgaaattactgaaattatcggtggtgcaaatgccttagaataaaatagaaaaggaggtagatgttttgagtaaaggcgaaattgtccaagttattggacctgtcgttgacgtggaattcccactagataaagatttgcctgatattaataacgccttacgtgtcacaaacaacaatggtgatactcttgttcttgaagttacactagaacttggtgacggtgttttaagaactatctcaatggaatctaccgacggtttaagacgtggtatggaagttgaagacacaggtgctccaatttctgttcctgttggtaaagacactttaggacgtgtctttaacgtattaggtgatccaattgatggtggtcctgctctaggtaaagatgtaaaacgtgaaggtattcataaagaagcacctaagtacgatgaactaagcacaagtgaagaaattctagaaactggtattaaagttattgacttacttgaaccatatgttcgtggtggtaaggttggtctattcggtggtgccggtgttggtaagacaactattattcaggaattgattcataatattgcccaagaacacggtggtatttctgtatttactggtgttggggaaagaacacgtgaaggtaacgacctttactttgaaatgaaggcatctggcgttttatctaaaactgctatggtctttggtcagatgaatgagccacctggtgccagaatgcgtgttgcattaactggtttgactattgcggaatacttccgtgatgttgaaggtttggacgtattattatttattgataatattttccgtttcactcaggcaggttctgaagtttctgctttacttggtcgtatgccaagtgccgttggttaccaaccaactttggcaactgaaatgggtcaattgcaagaacggattacttctactaagaagggatctattacttcaattcaagccgtttatgtgccagctgatgactatactgacccggctcccgcaactacattcgctcacctagatgctactactaacctagaacgtcgtttggttgaacaaggtatttacccagctgttgatccacttgaatcaacttctagtgccttagatccagaaattgttggtgaagaacactatgaagtagctgttaaggttcaacatattttgcaacgttaccaagaattgcaagatattatttctgttttaggtatggatgaattatcagatgatgagaagttaattgttgaacgcgcaagaaagattcaattcttcctttcacaaaacttctttgttgctgaacaatttactggtattccaggttcatatgtaccaatcaaggaaacaattaaaggcttcaagatgatcattgatggtaaattagatgatcttccagaagatgctttccgtaacgttggtccaattgaggatgttattaagcaagctgaaaagatgggagttactcctaaaaatcctgaagcaaaagcaatactagaagcaaagtagggtgatgcgttatggcagatccagaaaaaattataaaagttagcgttgtaacacctgatggtattgtctattcgcataatgctacgatggtagcaatgcgcgcaattgatggagatcgtgcaattatgtatgatcaccttccaattgttactcctttagctattggtgaagttcgggtaaaaagaacgcatgaaatgaatgatcgtattgaccatattgctgttaatgggggctatattgaattttcaaataatgaagcaaccattattgctgacagtgctgaacgggctcgcaatattgatgttaaacgtgcacaatcagctaagaagcgtgctgaacaacatatgcaagaagctaaagagaagcacaacgaaagagaaatgctagaagctgaaattgctttacgtcgtgcggttaatagattacatgtacgtgaaaattacggtaaatagaaatgagaaagacgaacgatgagttcgtctttttttatggagaaaattatatgatgaaacaagtaggagttcatgcaattgttagtctaatcacatatttagtgacgattgcattttcgttcagagcagtgagaggtctgagagtggaccagttatttaaaaagggacacacatttgaaattcaagtatttttactatttgtgtcgattgccttagggtttatagtcggacaatttattttggcattagtggatcaatccttagctttaaaaatgcttttttaatgatttttataagaaatgcttttgaaaagcacttctttacacttgtccttaaagtaaagcggtatttatgttacaatttttaatgattaaatactggaggcactagcgtggcaagagatataggaattgatttaggaactgcaaatgttctaataaatgtatctggcaaaggtatcgttttaaatgaaccttctgttgttgctgtagatactgataaagataaagttgtcgcagtcggtactgaggcatataaaatggtagggcgtacaccaggtaatattagagtaattagaccattgaaaaatggtgtaattgcagattttgatattacagaagaaatgcttagctactttattgaaaaattaaacgtaaaaggttttatgtctaaacctaatattctaatctgtgctcctactggagttacttcaattgagcaaaaagctattattcaagctgctgagaaatcaggtggaggccgagtatatctagactttgaacctaaagtagcagctgtgggagcagggctagatatttttagaccacaaggaaatatggttattgatattggtggtggtactactgatattgctgtcttgtcaatgggagaaatcgtaacttcccgctcacttcgttgggccggggataaaatgaatcaggccattgccagctatattaaacgtagtaagaatcttttagtaggacaacacactgctgagcaaattaagattcaacttgggaccgcttttgaagcggatccaactaagacgatgactgttcgtggtcgtgatatggttgacggattgccaaagcaagttacaattaacgagctagaagttcaaaaggctcttgaagatggtttaatgtcaattgtggctgcaactaaagaagttttggagcaaactccacctgaattgtctgctgacattatcgatcgtggtattatgttaacaggtggtggagccttactaaagaatattgataaattaattacttattatctccaagttccagttttaaaggctgatgaaccattagaagctgttgcaaatggaacaggtgtgttgcttaaaaatattgaaaatcatcagagacactaattatgaagagagcaagttttaatttttcattagtaaataaacatttaaaaaaattgggaaagattattttatacttgtttgcaaccatgctccttggagcctttattggatgtggtgttgcaagtggcaatccttttgcaattttctttcctacaacatggattcatttttttgagtttttaagttaaaatgaataaattgttaattgggttggtaaatgtttataagaaatttatttctccaattttgccaccaacatgtaggtattatcctacttgttcaagctatatgattgatgctttaaaaaagcatggagcaattttaggcttaataatgggactagcgcggatattacgctgtaatccttttattaagggaggagtagatccagtaccggattattttaccctgcgtcgtaatcctcatcctgaacgatatgaagatgaaattattgcgcaggcatttcattcgaataaaaagtaggagaatatatatgtctagaaaattggaaagtattgatattgaagttaatgaaagaaaaggcacttcagcacctacctgggaagttgttattcctggcaaacgttctattggaattattgaacaagaagaagaacgctaccatgtagtatcttccaaaacaaatcacagtctctattccaagactttagaaagtgctattaatgaattactttcatactttactttgcatgagaaataaacaaagtagggatatacaatgacaaaagttgaaaataaagcagattggtatgatcgcatcgcatggggtgtagtaattccagtctttttattagccgtcatcagtctatacggtatttgggtcgcaactgtgaatgatcctaaaatgggtagtccagtaaaagcagttattactcaagcagtttggtatctggtatcaattgcactggtgattttcgtaatgcaatttgatgcagaacaactttttaaaattgctccaattgcttatgggattggaataattttattaattgcagttttattcttgtataaccggcaagtatttgccgataccggtgcgaagagttggtttaaattaggaccattaacttttcaaccctctgaaattatgaaacctgcctttatcttaatgttagcgagagtagtagagcggcataatgaacagtatgcccatacttttaaaacagattggcttttgattggtaaaatatttgcatggttaattccagttgcagttttgttaaagctacaaaatgacttcggtaccatgcttgtgttctttgcaattgttggtggggtaattttagtttcaggaattacttggaaaattatcatcccagtatatggtgttgtgtttattattggtgcagcagcaatcttactggttactacccccggtggacaagcatttttaggaagtgcatttaactttagggcctaccagtttcaaagaattaactcttggttgaatccatctcaagatacttcgtcaggtgcttatcaattgtggcaaagtatgaaggcggttggatcaggtcaaatctggggacatggttttggtaaagttagtgtttatgttcctgttagaacttccgatatggttttctcagttattggagaatcattaggttttgtaggatgttgtgctttgattttgatttatttctatttaatttttcaaatggtcaaaattacttttgaaacaaaaaatgcattttactcttatatttctacaggaattatcatgatgattttattccacgtttttgaaaatatcggaatgggaattgatcttttaccattgactggtatcccgctaccatttgtatctcaagggggatcagccttattaggaaatatgattggaattggcttgattctatcgatgaagtggcaccataaagattatatttttagtaccgctggagacttttaaaagtataaaaaaatacctcatcatttttgatgaggtatttttttgctcttaattttttctatttttcttaatatcttcgttttgtgcagctggttgacgaattacaagaacatcacaagctgcagtacgggtaacatactccgtaatactaccaattagtaatctttctacggcgtttaaacccgtagcacctaaaattattaaatcgatattgtgttcttctggaaactcatgagcaatgatattctttggagaaccaaattcaattgaatagtgaacatctttaactccagcatctttagcccggttataatattcttcaattttggtttttgcctcttcagatacttgttcaaccattgctgaatcaaagctagaaacatcttgaaatgcacgagtatctactacgtgtaaaatttcaagagtagcaccgtttcttttagctacttcaacagctttgctaaatgcaacgtcagcttcttttgaaccatctacggcaacttggatatgttggtattgttttaacatgttgatcacctctccatcaatattttaccaaaatttgatttaaatagaataataataaaactattcatttaaattcatgaaagtaaatgaaaagatggaaagcgccattgcagcaataattaaggtaatgaaattaaatattttaggtaaggtaaataaaataataatcccaataaaaccagttaaaattaacactaaactagtaattgagaacagcatattaattttcttatttccgataaaagtgaaaataatgaattgtcctttatttttacttctaattaaataccaagctgtaataaacactaataaaataaaaattagcattagaacttttaataccacttattaaacctcacttaataaaaaaagcggcttacgccgcttccttgaatttcaataaaatctgagttgactgcaacataatgacgcttgttgaacccgcagtgttcaaaatttgaatctatgtcgcagtgaatatggatcctaggacaagctagtattccgattcagatgttattcataaattccaacgtctttagtttgatcggtcaactttgtaattaggttgatcaactcagatcactatctattctagcaaagatatgattaatgtcaataaattggatttacttttgcagcccgtctttttgcattttttttaggcgcagatattgtctttttaatgcatcttcaactttagaattacccttcggattaaagtaggagacattttttaggttgttaggtaagtattgctgggcaatccaatcaccttgaaagtcatggggataaagataagaaacaccatgatttaaggtagccgctcccttgtagtgtgcgtcctttagactatcagggataggatcattctgcttatttcgaatgtcacctattgcggcatcaattgcagtaattgcactattacttttgggcgataagcagagttcaatgacagcatttgacaaaataattcgcgcttctggtagacctaccatttgagcggcttgtactgcattaactgcacgactgcaggctgggggattagcgagtccaatatcttcataggcaattaccaataatcgtctacagattgctactaaatcgccagattcgcagagattccctagataataaagtgctgcatctgtgtcagaaccccgaattgatttttgaaaggcagataataaatcgtagtggccatcaccatttgcatcataattttgagatttaaattggatggaatcttgcatttcagctttatcaattactagtttattatcagcgttctcctgtttttcttcttttgttgatagaactgctaattctaatgcattaaggattgctcttaaatcgccatttcctttttcaatgaggagattacgcgcatcttttgttaactctacattgtatttacctaatcctgtttcggaatctttaagagcacgatcaatcgcgtgcgaaatatccatttctttaagacgatgtaattcaaaaatctgacatctggatcgaatagcgggagagatggaaatatagggattttctgtcgtagcaccgattaaaataatattccctgattctaaaagaggtaatagaaagtcttgctttgttttgtctaaacgatgtatttcatctaaaagtaagatgacagttccactcatttttccttcttcagcaacgatttgaagatctttttttgtgtcagttgctgcattaagttttctaaatgcatatttagtggaacctgcgattgcgctggcaatactagtttttccaataccaggaggtccataaagaatcattgaagatagaagtttagcttcgaccattcgtctaattattttcttatttcctactaaatgttcttgaccaacaacttcatctaagtttttggggcgcatacgataagcaagaggttgcataattagtccttttttctaaataatttgtcccagaaattttctttttttggttttgataattgttcatgtggcacttctggagcatatacttggttgatgtcaattcgataatgattaatagcagtttttgaaactactaaaacgccagtggagtctggttcgtttttggcagtttcgtcatttattaaagtgaacttaatatctttttgtgaacacaaactcattaatttactaataaatttattttgaggcattttaccattgattaagatagtataatttttaaagtcatttaaatggtctaaaaacaaagtatctaaggccgggttatcggtttcttttacagtcattcttactagaactcgttcacgtaaagaacctaaatatcttctccgttcatcgggacaagtttgaggagtaatacctttagcagcatgttcaagacgtgtatttaaatcttcagtcatatttctttttcctttttataataaaatattacattcttagtgtagcaagtggaaaagaagaaaacaaaaaagtctttccaaaagaggaaagactttttgtaatgaagcagtaagtattaaagcttcttgttgtaccattcaacgataagagcttcatcaacttctggttccatttcgtcacgttctggaagacgaactaaagtaccagtcatcttgctgtcgtcaaatgaaacaaatggtggacgtgatacaactgcatctaaagcgtccttaacttgttgcaagttctttgacttatctcttaagctgatttcttgaccaactttaacttcgtatgaaggaatgtcaacacgcttgccatctactaagatgtgaccgtggttaacaagttgtctagcttgttctctagttgaagctaaacctaagcggtaaacgatgttgtctaaacgtctttcaagtaaagccataaagttaacaccgtgcttaccttcacgaatcttgccggcacggatgaataagttttggaattgacgttcatttaaaccaaacatccaacgtaacttttgcttttcttttaattgttgaccatattcagaaacctttgcacggttgttaggaccatgatcaccaggtgcgtagttacgacggctaatttccttaccagtacctgaaagtgagatacctaagcgtcttgaacgtttccaacttggaccagtatatcttgacataaaaaatcctccataaaaaataataattttttggagtaaaatatgagaaataagttcaacattcgtgcatctcaagttgcatgtttcgcccagtgcagcgcgggttactcgttcactaaacgcctcaagatgttgacgttcttgtcacttattgctgcaaatattttacacgaagactattatagtaagaaatatgttttaaagcaagtaaaagtagagattttctagctggtattaagatgaagtctggtataattaatatgaaatatggagggtattatgtcatcagggttatctattcttattattgtaatattgattgctataattgctgttattgctacagttgttattcttaataagtattttaatcatcagattgcggaattagatgcgctaactgatgaattgaaagatattagcgttgaagaagatattaaacgtttagagaaaatggaattagccggaaaaagtttggaaacttttaaaagatggcagaaagtataccagaaggttgatactaaggacgttggagaattaaagcatcttcttgaacaagcggctgggcttaatgcaaaatttaatttaataaaaactcgccaattaattaaagaagcaacagaattattacagactaatcaagataatgtagaacacagtaagcaagtatttactaatttactcgaagcaaatcgagataatcaaaagcactatgctgctttatcaaaagactaccaacaactacgtaaaaaaatattatcccaatcttttaattatgggaatgcaattgatcagattgaagaagatctggcgactttagaaagtgattttcaaactgtaaagaatttatctggtgaaggagatcatgaagaagcaaagaaagtattagttaaaattgatacacagcttaccactttaaaaactgatcttcctaagatagagaactttgatcaagagttgaaaaatgtttttcccgaccaacttaacgaactcagcaatacttaccgtcaaatgataaaagataagtacaaaattactgaagtggatgtactagaagaaatcaagagcttaagagaactagttgatagtactaaaaagagtcttaccaaattagagcttaaaaaggttgaaaagaataataaagaaataagtacacgaattgatagcttatatgacattcttacaaaagaatttaaagctcggccatttgttgataaaaatcaagataaaattgttcaaattctttcccatgttggaaatgcatctaatcaacttgtagctaagttagagcatgtggatcaaagttatgaattgacacatggagagctagctgaagctagacaactaaaaagtcaagttagccgaatgaattctgactttgatgttgactgtcaaaaactagctgatggcaacggtgtttattctcaaattgagaataagtggctaaccatgttagataatttaaaagaaattgaaaagactgagaaaaaactctcaaatgatatagatggactatttgatgcagaaaaaattgctaatgattctataattcattttaagcaagaaatttctttagtttatcgaaaagttgaacgacgtcagttaccaggaaagcctgaaagtttcattcaaatgtatactttagtcttaaatgaagttaagcatacagataatgaattgaatcaagttagaataaatatggaaaaaatatctagtgaactgattcagattcaagaagatattgaacgtttaaagaaagaagcagatgagattttaaattctgctgatttagttgaattgactatgcaatattcaaataaatatctttcaaatcctgaaattaaacgcgcacgtaaagaagcttatgatttatatcagaataaatatgagtataaagaagcgttggacgtaattgcgacagcgctagaaaaggtagagccaggaagctatcaaagaattgaaaaagaatactatagcgagcaagaagcagacgaagaagagtaaaagattgaagcaatagtatttttaagttaagattttatatgattatcaaacgaccatcttctatggtcgttttttaggggagaaagaaaattgatctattttgataatagtgctacaacagctgtctatcctgcagctttagagacatatgataaagtaacaaaggatatctggggaaatccttcaagtttgcataaaatgggagatcgatctcatcaacttttagaagcttctagaaaacaaattgctaatttattgaatgttaagccatatgagatatttttcacatctagtggaagtgaatctgataattgggcaatcaaaggtactgctttagctaaaaaagaatttggtaaccatattattacatcaagtgttgaacatgcagcagtttcaaattcagtacgtgctttagaaaatttgggatttcgtataactgttttaccagttgataagagtggacaagtaaatcctgaagatttaaaagaagcattagataaagaaacaattttggtttcaattatgggcgttaataatgagattggtacaattcaacctattaaagctattagtaaagttttagaagattatcctaacgttacttttcatgttgataatgttcaagctttgggaaaagatgtttgggatgaggtatttactgatcgagtagacctaatgagtctatcagctcataaatttcatgcacctcgtggcgtaggtattctttataaaaaagaaggtaaaatgattaagccgttaattgatggcggtggtcaagaaaaggccctacgttcaagtactgaaaatttacctgcaattgcggcaactgctaaagccatgcgtttatatttagctgatgaaaagaaaaatgctgagcaagaattggcagttaagaataaaatagtttcctatctaaatggaaaaccaggaattcatattttttcaccaattaacgataattttgttccaagtattttatgtttttcattagaaggtattcgcggggaaactttagttcatacgcttgagtctgaagatatctatgtttcaaccactagtgcatgttcttcaagaagtggtgtagagagtggcactttgaattctatgaaggtagatgatgatttagctaccggtgcaattagactaagttttgatccaagtaatacaattgaagaagctgagcaatttatttcagtttttgataaaatatataagcacttcgctgaaattaatcatttgaaataaggtgaaattatgcaatatacagaagtaatggttcgctatggtgaactatccactaagggaaaaaatcgaaaagattttattgggagacttgctggtaatgtaactagagctttgcaagattttccagaaattgagatccatcctaaacatgatcgtatgcatattgtcttaaatggtgcaccatttgagacaattgatcaacgtttaaaacttgtttttggtattcaaacatattctccaactataaaagttgataagaatcttgatgcaatcaaaaaagcatcccttgaattgatgcaagcaacttttaaagatggtatgacatttaaagttaatactagacgcagtgaccatgattttgaatatgacactaatcagttaaacatgatgattggtgattacctatttgataatatggataatttaaaggttcaaatgaaaaagcctgacctagtcttaagaattgaagttcgtcaagacgcaatctatatttcaaaccaacttcttcatggagcaggtggtatgccggttggaactgctggaaaggccgtcatgatgctatcaggtgggattgattctccagtagcttcttacttagcaatgaagcgtggagttgaaattgatatggtgcacttctttagtcctccatatactactgaaaaggcacttgctaaagcaaaagagttaactggaattttggctaactattctggaaagattaactttattgctgtaccttttactgaaattcaagagcaaattaaggaaaagttaccagaaggttacttaatgaccattcaacgccgctttatgttgcaattagcagatcgtattcgtgcaatgcggggtgggttagcaatcttcaacggtgaatcagttggtcaagtggcatctcaaacactagaatcaatggttgcaattaatgatgtgacttcaacgccggttcttcgtccagtggctacaatggataaaactgaaattattaagctagctgagcaaatcggaacatttgacctttctattgaaccatttgaagactgctgtacaatttttgctccgccgcgtccaaagactaaaccaaaattggatgaagctcgtaagctagaagatagacttgatgctgaaggaatgattcagcgagcaattgatggaatggagattacaccaatttatccaaatcaaaagttcttggatgataaggctcaagaagacgcagacttgttataaaaaagtgctagcagaatgctagcgctttttattttagaaagacaaaatatatgagaattgataagtatttggctaacatgaatgttggttcacgtaaagaagttcataatctcattaaaaagaagattgtgacagttaatggagaagttgtaaagacacccaaggagcaagttaaagaagaagaccaagtagcagttgatggagaaaaagtggcatatcagcaataccattattttcttctcaataaacctaaaggtgttatttcagcaacagaagataaaagtcaaaaaactgttctttctttacttaaacctaaagatcgttataaagatatagcgccagtaggtagactggataaggatacaacgggtttattattgttaacaaatgatggtgctttagcccatgagttgctagctcctaataaacatgttactaaaaaatatcgggcaaaaattgctggagtagctgatgaagagacagttaaagtttttgctagtggtatgacattaggtgatgggacaaaactaaaaccagcagaattaaagattttgatgcaagataaagagtccgatcaatcagaaattgagattgaaattcaagagggaaagtatcaccaaattaagcgaatgtttggagcagtcgggatgaaagtaatagaattagatcgaatttctatgggaaaattagtcctaccagctaacctaaaacgcggccaatatcaagaaattactctaacagatatcaagtagagaatgagaattatgaataaatatattttggttggtttctttattttgatttttccttttacttgcggttttttaaacatcgcccaccggggagataatgaacaaggaaagtttgcagagcatagttggattgcatatgatcgtgcagtatgtgcaaaagtagactatttagaactagatttacaacaaactgctgatcatgttctcgtagtgagccatgatgaaaacttaagtagagtttttggaattgataaaagcattgcaaacttgccttatcatgatctaattacatataaaaatcaaaatgatgagtccattcatcgtcttgtcgatgtctttaaacgttatcagagttctaacgtaaaatttatgattgaaccaaaagataatagtgataacgatatcaataatctacttagtttaatcaaaaaatatcatttacaaaatcgggtgttgttagaatcgttctcagagctagctcttttaaaaattcataaaagtgatccacaaattccactaactcaattagctggtgattttaaaatatcaccaatgctgcagtattatgcaaataatttttatgctaagaaagctgcggattatttaggtgagcataataaaaagtatttactctggggcattgatacagaaactcaaatgaagaagtattcgcgcccagaagaaaatgtttcaggaatattgacagattatccagttaaattggccactattttacatgaaaataatgtctttaaaagatactatgaagcagccgcttaccccagtgaatcaatttcaggttatatgtatttgaaaaatggtaaaaaagtttatgttgatcaagttaaaatgaaagacaatcaacttttttatcatgtaaaacctaatatttggattagttatgataatttaaaaaattccaataagtttgctcctaaagcacaagttggcaaaatcaagttagaacatgatgttcaagtttataccgatccagcttttgaaaagaaaaccgagaagaaattacgtaaagatagtgcttggaattattttgcagtaaagaaaatgcccgggaaaactgcctataacttgggtggtgcacagtgggtaagtcaataattttttattgctagcttaattaaaacatggtaaacttataaccaacatatagggagtaaccggcataagggtgtacttacggcgtcaaaacgaaattaatttttccgctgtaagtttaaatggtgagactattggctaaactttttttgttcagacaatggtctctttttttataccaaagtctggttttcctattagatggagggtttaagtgaaagcatattatcgtgagagtaaagaggaagttctaaaacagcttggagctaacgaacaacaaggtttaactagtaaagctgctcaagaaaaattagctcaagtaggacccaatgctttagtagaaggtaagaaaaaaagtgttgtagaagtctttttagaacaatttaaagacctaatggttattattttgattgttgcagctgtgatttctgcatttactggtaacttagaaagtacagcagttattattgttgttttgattctaaatgctattttaggaacagtgcaacatgttaaggcggaaaagtcgctagaagccttgaagtccctatctgcccctgccgctaaggttttaagagatggtaagaaacaagaaattgccgcaaaagatgttgttcctggcgatatactcttacttgaagcaggggatttagtcactgcggatggtagaattttagataatttttcattgcaggtaaatgaaagttccttaacaggtgagtcaactaatattgacaaattagacacgacttttgaaaaagaagttcctttggctgatcgtgtaaacatggtatattctagttctcttgtaacttatggacgtgcaaatgttttagttacagcaactggtatggatactgaaattggtaaaattgctaccttaatgaatgaaactaaggagcgcagaacaccattacaagtttcacttgatcaattttcatctcgtcttgcaactgcaattttgattttctgtgccttgatcttaggattgcaaatgtggcgtggtcaacctttactagatgcattactatttgcagtagcattagccgtagcagctattcctgaagctttaagctcaattgtaactattgtgcaggctatgggaactcaaaaaatggctaaagaacatgcaattatcaaaaatttagctgcggttgaatcattagggtcagtttcagtaatttgttctgataaaactggaactttaacgcaaaataagatgactgttgaagacatttatattggcggtaaagttcttaagccggaagagttgaacttaagtaatcagttgcatcggtatttactatatgatgtagttttaaacaatgatgcaagtttatctgatggtaaaaaaattggtgatccaacagaatcagccttattagaaatgtaccgtaaagttccaggaattgatcttggtgacggaaaattaggcttatctgaaagtgagttaagagaacatttagatcgtttagaggaagtgccttttgactctgatagaaaattaatgagtactaagcacttaattcacactgttcctacaatttttgtaaaaggagcaatcgatgttttacttaaacgttgtgtgaatattcgttttggtgatgatgtccgcccaatgactgaacaagatcgaaaagatattttggctcaaaataatcacttttcagaaaatggactaagagtgttggcatttgcctataaggaaagtgatgaagagttatctactgatagtgaaaaagacttaactttcattggtttagtttccgaaatggatccacctagaaaagaaagtgttgcagctgttgcacgtgctaaagaagccgggattagaactgtgatgatcactggtgaccacaaagtaactgcagtagcaattgcgaaaaagattggtgttttcactgatggtgatcttgcattaacaggtttagagttagatgcattaagtgataaagaattagaccaacaaattgaaaaagtagcagtttatgctcgagtttcaccagaaaacaaaattagaattgttaatgcctggcaaagaaagaatcatattgtatcaatgacaggtgacggagttaacgatgcacctgcattaaagaaggcagacgttggtgttgcaatgggtattactggtactgaagtatcaaaagatgctgcaagtatgatcttgactgatgacaactttgcgacaattattaaagctgttgcaaatggtagaacagtttatgaaaatatccgtaatgcgattggatatttattatcgggtaacttatcagctatcattactgttttatttgcttcaatcgctgcattgccagttccatttgttgcagttcaacttttattcattaacttagttactgactctcttccagctttagctattgggatggagccaggaaatcctgatattttaaaacgtaaaccacgtgatcctaaagctagtttgttagataaaaaattcgttacacaaattagtattcaaggttttttaatttcactaagtgttattgctgctttcttacttggcttaagagatacaccagcaattgcatgtactatggccttttcaactttaacgtttgcacgtttactacatgggttcaattgccgttcacaacacagtatttttaagattggatttaaaaataattggtacagtttggcagcctttgcattaggtaccgtacttttagccttaattctttttgtaccagcattacatggactatttgcagttcaaccattaactgctcaagaagtatggttaattgtaattttggcaattattccaactatcttaattcaaatagtgaaagtgattagagaaaatagagattaattcttagctttcttcttattttctttcatgctataatcataaacaaagcaagaatcaagaggagtaatttcgcattacagagaaaagtcaatatgctgagagacttaaagaatattactagtagcttgattagctgattaattgaattttttagtaggttaatccggacacttcagcgccgttatcgcttataagagaggtataggttctatatctaatcgtaggtggtaccgcggaaaaatttcgtcctagacaaatatttgtctaggacttttttattggaggaatttaaatggcagatttagcacctaaatataatcctaatgaagttgaaaaaggaagataccaggaatggcttgatgaagacctttttaagccatctggcgataaaaaagctcatccttattcaatcgttatcccaccaccaaatgtaactggtaagttgcacttgggacatgcatgggatacagcaattcaagatacattaattcgttttaagcgtatgcagggctatgataccttataccttcctggtatggatcatgctggtattgcaactcaagctaaagttgaagctaaacttcgtacacaaggaaaagatcgtcacgaaatgggacgtgaagcttttgttaagcaagtttgggactggaaagatgagtatgcatcaattatcaagagccaatgggcaaagatgggtctttcactagattattctcgtgaaagatttacccttgataaaggtctttcaaaagctgttagaaaagttttcgttcaactttataatgaaggactcatttaccgtggtgaatacatcattaattgggatccaaaattggaaacagctcttagtgatatcgaagttattcacaaagatgataagggcgcattttaccacattaagtatccatttgcagatggttctggatttgttgaaattgcaactactcgtcctgaaactatgtttggtgatactgcagtagccgttgcaccaggggatgaacgttacaaagatattgttggtaaggaattagtattaccacttgttggacgccacatcccaattattgaagaccaacacgttgatccagaatttggtaccggtcttgttaagatcactccagctcatgatcctaacgacttccaagtaggtaatcgtcataacttagaaagaatcaatgttatgaacgataatggaactatgaatgaagaagctggtaagtatgctggtatggatcgatttgaagctcgtgaagctttagttaaggatcttaaagaagaaggcttcttaatcaaggttgaaccaattgttcactcagttggtcactcagagcgttctggtgttcaagtagaaccaagactttctaaacaatggttcgttaaaatgaagccattagctgaaaaagttttggaaaaccaaaagactgatgacaaggtaaactttgttcctgaaagatttgaacatactctggaacaatggatgagcgatgttcatgactgggtaatttctcgtcaattatggtggggacacagaattccagcttggtacaacaagaagactggtgaaacttatgtaggtcttgaagctcctaaagatagtgaaaactgggagcaagatccagatgtacttgatacttggttctcaagtgcattatggccattttctactttaggctggcctgatgaaaattcagaagacttcaagcgttacttcccaactaatactttagttactggttatgacatcatcttcttctgggtatcaagaatgatcttccaaagtttacacttcactggcaagcgtccatttgatgatgttgttttgcatggtttaattcgtgacccacaaggacgtaagatgagtaagtctttgggtaacggtgttgatccaatggatgttgttgatgaatatggtgcagatgctcttcgttggttcttacttaacggtacagctcctggtcaagatactcgttatgatcctaagaagatgggtgcagcctggaactttatcaacaagatttggaacgcaagccgtttcgtaattatgaacttgccagaagatgctaagcctgcgcatatgccagatacttctaagtttgatttggcagatagctggatttttgaccgtttgaatcacactgttagtgaagtaactagattatttgatgaatatcaatttggtgaagctggtcgtgaactttacaactttatctggaatgacttctgtgattggtacattgaaatttctaaggttgcattaaacggtgatgatgaagaattaaagactagaaaacaagaaaacttaatctggattcttgatcaaatcttacgtttacttcacccaatcatgccatttgtaactgaaaagctatggctttcaatgcctcacgatggcaagagtattatggtagctaaatatccagaaactcataaggaatttgaaaacaaagaagctgacagtcaaatggccttcttaattgaagtaatcaaggctgttagaaatatccgtatggaagttaatgcacctatgtcatccccaattgatatcatgattcaaattgatgatgataataataaagctgttttggataataatgctgaatatgtagaaaacttccttcatccaaaagctttatccgttgcagctgatattgaagcaccaaaacttgctaaaactgccgtaattccaggagctcaaatctttgttccattaactgaattagttaatgtagatgaagaactcgctaagatggaaaaggaagaaaaacgtcttgaagctgaagttgaaagagctgaaaagaaactttcaaatcaaggatttgtagcccatgctcctgaagcagttataaataaagagaaagaaaagaaggctgactacgaaagtcaacttgctggtgttcgtgaaagaatgaaagaattaaaggaaagtaaatagaagtgaaatttactaatgttgaccaggtaattaagagaatatattctttacccaaacttcatcctaaaaatgatctgagttatatccgaaggattttgaaacagttaaataatcctcaagatagtgttaagacaattcatgttaccggaacaaatggtaaagggtcgacatcctattatttgagtaatctattgcaaaaggccggtcaaaagactggcctttttgtgtctccttatatatatgaatttaatgaaagaattcaattaaatggtaaaaatataagcaataatgatctcattaaaacagctaatgaaattgagatggcaatagagatactaaaaaaagatgatcctgatttttctttagtaacatttgaatatgaagtagctttagcctttcaattttttgctcaagaaaactgtgactatgcagttattgaagtagggattggaggagagcatgacaagacaaatgtaattattcctgaagtaagtgttattacaacaattggattagatcatgaaaaaataatagggccaactttaaaagatattgctaaagaaaaaagtggcataataaaatctaatagacctgttgtcttaggaaatgttcctcaagatgtactagagattttacttaataaggcgcaaagtgaaaattcaaaatcatttttattaggaagagatttccaaataaaaataatgcccgatgtgattaaatatcaagattcaaagaatatctataattttgcattacggcctttggtagaagcttatgatatcgggatagcagttcaagcgattcaattgttgcaacttgatttagatagaaaaaagattgaagaagcaattaatgaaacccgtattcctggtagatatgatgtgattcaaactagtcctgaaatcattgtcgacggggcacataatttacaagcgatggagaatcttttaaacttagttcgaaagaagaaaaaaggacaaatctacgtgttacttggaatgatgaaagacaaagacctgggtccagtcacaaaattatttaaggatgaaaaagtcactttaacacggattgattatcctagagctgctagattagaagattttccaaaagaagcacaaaaagaatttgaatataaagaaaattttgaagaagcttatacaagcttgaagaataaattgcaggcagatgatatgctattagtgacaggatctttttatttagttggtgcagttttaaattactgtaaaagaggtaaagatgaaagttgaagatattgctgatcctattgaaggtataatttttgatatggatggattattagttaattccgaaaagttgtattgggatgctaatatcgtagctgctaaagaagcaaacttagatattcctgatgatagttatctgaaactagttggttcttcagttaaggaaatggaagatttttatcataaacattttaagactgaagccgatcgagataaatttattaaaagaactgatgacttagtctggaaatggactgatgaaggtaaacttagacttcaaccaggagtacgagaagcattagcggtatttaaagagaaaaatatcaaattatcaattgcatcgagtaattatgagaatgtaattgtccataatttagatgttttaaaaataaaatattactttgatttttatctaagttataaagatgttgaatctggaaatattaaagctaagccagcaccagatatttatctactggctgctaaaaaaatgcaattacctaaagagaatctactagtatttgaagattcaagcacaggtgttgcagcagcaagtgctgcgggtttaaaatgcgtaatggttccagatttaaagcaaccaacaaatttagataaagataaggcgacattaatctgcaaagatttttatgcttttcttgaaaaaattaaatagttttttcgtaataaatatcaaaggagtaattgatatttatgaaaaaagaagaattattgcagactgatgttgatttaataaagaaattagctgaatcgttagagaaaaaagatattcttacatttaatagtttatttagaaaactagatgaggtagggatcagtagctttaaggaactatggcaatttgctgctagcccaagttgcaatgatgaggtagcaattttacttcaattattattggagcgcgtaaagagcgtcaataataagaaaattgagagcttttactcgagttcacaagtaggatgctatatcgcggataaattatgtggccgtccgcaagaagagctatatggaatttatttggattcaaaaaataagataattgctgaaaaattaatttttcagggaacggtaaatagagcagttgctcatcccagagatatctttcgatgggctgtcatttataatagtactgccttttttgtagcccataatcatcctagtggggatgaacagccatcgcaacatgatttacgctttacaaagaagttagtagaagcaagtaaatgcatgggaattgattttttagatcattttattgtgacagataatacctatttaagctttcgagagactgaacttctttaagtcttccttaagtattaggcaaatttccttaaagcaaatttttacatcagtgtttctatgctataatatctaagactaaataaagatacgatttaggctaaaataattaaagagataaatttaaggagagattttgcgtgtttggattaggatctaaaaatattgggattgatttgggaactgccaacacactcgtttatattgaaggtaaaggtattgttttacgtgaaccttctgttgttgctaagaatactcaaacgggtgaagttattgcagttggttccgaagccaaagaaatgattggtagaactcctggatcaattgtagctattcgaccaatgaaagatggagtaatcgcagattacgatacaactgctgctatgcttaagtatttcatggaaaaaacagttggtaattcaaaaccagctgcaatgatttgtgtaccatcaggtgtaactgaagttgaaaagagagctgttattgatgcagctagagttgctggtgcacgtgaagcatacgtaattgaagaaccatttgctgcagctattggtgctggccttcctgttatggatccaacaggttcaatggttgttgatattggtggaggaactactgatgtggcaactatctcattaggtggtattgtttcatctcgttctactagaatggcaggagataagtttaatagttcaattgcaacttatattcatcaaaattacaacttattaattggtgaaagaactgctgaaactattaagattcaaattgcttctgcttcagttgaaaaggcaaaagaaattgaatcaatgaatattcgtggacgtgatttagtcacaggattaccaaagtcaattgatattaatgcagaagatgttgcaaaagctattcaagaagtagttcaaaatataattgtagcaattaaagaaactttggaagaaacatctccagaaattgctgctgatgttattgaccatggtatcgtattaaccggtggtggagctcttttgaagaacttaccggaagttatttcagatgctactaaagttccagtctttattgctcaagatccacttgattgtgttgcaattggtaccggtgaatctctcaaaaatattgaagttatgcgtaagagacgttaatttagagaccggcgtaaaagccggtctttttctattaacttttaaattaggaagatagtagtagatgaaaaaatttctcaaaaacaaaaagttattgacaatttttgtcctagttattttagttttaagtatgttatctatttctgttcgcttacgtaataggagacaatcaccttttttagttcaaaaaattggtaatgatacggtttccatagtaacccgagtagttaattggccaattaacttaatttctaatggggcggctaatgtagaagatctgtttaatactcaagctgaaaacgatcatttaaaaaagcaagttgataatcttgctcaaactaaggctcgaaatagttcacttgaagctgagaacactcagttaaagcaagctttaaaattaaagaaaactttgacggactatacaattattaatggttcggtgatttctcgtgctgcagatacttggtcagatttattaattattgatcaaggttcaagagcaggtgttaagaagaatatgcctgttatggcaggtaaaggtgtaattggacgggttgttgaggtaaatagtactacttcaaaggtcgaactgattactacaactgataaatcaacaaataaatttgctgtagaagctgatgcagctaatggtaaaaaagttcatggagtaatttctgttgttggaaataatcaaatagcatttacccaagtagttgatggtcaaaaattgaagaaaggaactcgagtttatactagtggaatgggtggcctatctccaaaaggtctcttaataggaacagttaagaaaacaacccgggatacttttggcttatcagatgttgtcgaaattcaaccagcaggtaaccttaacgatccatcagttgtatctgtaattaaaagaaaggttgaagagtaatggcagaattacgtcgatggtatgttgccattgctttgtttgtggcattaattctagatggagtattagcttataatttacagacttttatctttcatcgaggtttttctggaagttgttggttaacaattattgggattaccttaatttctctatgcgatgataaaaatgatgctgatatttggctctgcttaggattaggccttattgcggatctatactatttaggaattattggaatttatactgtagcttttcctttaatctgttttattattcagcaaagtgctcgctttcttccagaagtattctggtttagattattaatctgtttagttacttatttatgcgtaagtgcttatgtgtttttgatgtttaatatggtaggcataatccaattgtcttttgctagtttttcacgtagtattttgcctaatttactatggtgcttaattcttgttttatgtacttattggttctgggtaaaactagctgaagagtatccatttttgaaaaaagaatactatttctaaacaaaaaagagtcgctgttaagcggctctttttaacatgcaaaagattttaaaattgaaagacaccagttccaattaaagcagtagctactaccccaagaagggtgataactgccataaaccaggccataataatagttaacttttgaaatccggattttttcttacgttttctcatatgtccctcctaaattaataattctagtgtaccatgttttaattgtaattttatatttaattgaaatagtttaaaataaacttattggaggttttcatgaattttttgcttatctttttaattcctttatgtggaattatcgttgctgcttttttagtgaaattatttcctaaggctcaatttagtggttatgacattttgccttttttctttattgttgcttgtcagttattaactcaagaaacaaagcagccatcttttttaccgtatggatttttactttactttattttagttgtaattgtttcaatttatactgcaattaaaaacaaaaacatttcagtgggtaagacatttggaatgttatggcactatttagcagcatcatctattgtttggtacgttggtctcttaattttgcttttactataaaaattttccccacttttttaataaaccttaaactgtcctcaatcataataatgagggcattttttgttggataaaattataattatcataaaataacgtaatatataaataaaaagtataaaacttgtggtagaaagtggggaagtgtggtaaattattcattggaaagggggctagaccatgttcatgggcgagtatcatcataatctcgacagcaagggccgactaattataccagccaaatttagagttgagattggtgataagatgatatttactcgtggaatggaaggctgtatttttggctatccaattgaagaatggcaaaaaattgaggctaagttagccaaacttccactgactaagagaagtgcacgtaagtttacgcgacttttctactcaggcgcgatggagagtgagtttgacaagcaaggacgtgttaatctgaccatgacactgaaagagcatgccgcactcattaaggaatgtgtaattgttggtgtttccaatagaattgagatttggtcagcagaacgctggaatgatttctcagaggaagccaacgaaaactatgacgatatcgcagaagacttggatgacatcgagttataaaattatgaaattcaagcataaaagcgtgcttttgcacgaaacaatagacaatttaaatccaaaagatggtggtctttatgtagacgcaacttttggtggtggtggtcatgcccgatatctactcagtaagttaaataagggtactgtgattggatttgatcaagatgagtatgcaatttctatggcaaaagagagttttgccaaggagttacaggtaggagcagaacctcgattaatgttggttcatgataacttctgtcatttgaaagaaaatctggtagagctggggatttcagatggaatagatggtatttattacgatctcggagtttcgtctccacagtttgatcaacctgaacggggtttttcttatcgtttcgatgctcgattagatatgaggatggaccaaagccaagagttagatgcttatacaatagtaaacacgtggtcacaaaaagaattaagtgacgttttgtataagtatggagatgaaaagttttctcgtcagattgctagaaaaatagttgatcgaagaaaagagaagccaattgtaactacttttgatttagtagatgtgattaaggatgccattccagcatatgcacgacgaagtgggggacatcctgcgaagaagagctttcaagctattcgagttgcagttaacgatgaattaggtgtattacaagaatctcttgaagaagcaattaagctattgaagccaggtggtcgaattagtgtaattacttttcagtctcatgaagataaaatcgtcaaaaagatatttaaaaagtattctgaagtcgaaataccacggggaatgcctatggtaccggctgacagtaaaccaacattgcgattgattagtcgcaaacctatcatggcaagtagcgatgaattagaggaaaataatcgctcacacagtgccaagttaagggttgcagagaaattataatttttagttagtatttaaggagaaaaagatggctgatagctcagcaagaaatttaaattatcaacaaagtcaacagcagactgagcagccaaagaaagcaattgttcttaatcctaaaagcgttccttggacagcatttgaaaaaagtttagtcgttctaggttcactcattacattaggtttaatgattttattggtttcagctagcatttccgctactagtgctcaacataaattagcaaatgttgagcaaacaataatttctcaaaaaagtcataacactgatcttcgtcagaagattggtgaattaacgtcaactactagaattaataaaattgcccgtgatcaaggcttgcacttggttgagagtaacattaggaatgtccgttaatgaaaaagtttaataacttaaatagaaatagatccaaagcccacggctaccgctttacggtggggagaatcctccagctagtcttggctttggtttttcttgtatttataggtagatttttatatatagggatttcaaatcaggttgctggcgaaaacctaaataagcgtgtaaatcagatttataggcgaaatgaggttttaaaggcaacccgaggaacaatttatgataaaaatggtttaactcttgctgaagatgcgcatgtctttactgtatatgccatcttagataagagttcaattgattatcataataagccaatgtatgttacgaataaacgcaaaacagcacaaaagttggctgaagtacttcctttaagtgaggaaaagatatattcatatttgactccgaagcataaagctttccaggttgaatttggttcggctggaacaggtttaactttatctcaaaaggaaagaatcgaagagatgaagttgccaggaattaaatttatcgaaactccatctagactttatcctaatggaaattttgcttctcacattattggtttggcacaacccaaaaagaaccaaggaaacagtactttagttggtacgatgggaattgaagcatactttgataaacaattggcaggtaaagatggttatcgcgaagcttttgttgatgcagaaaattatcaattacctaatagccaaaagaatgcacgtgctacaaaagatggagacaatgtttacttgacacttgattcacgactgcaaacttacttagaggttttaatgtcgcaagtgcaagataaatacaagccaaaagctttaacagcagttgtagaagatattaaaactggtaaaattctggctgcttctcagcgtcctacctttaatcctcaaactaaaaagggattagatacatcatggcgaaatatgttagtgcaggattcctatgaaccgggatcagttttcaaagttttaacttattcaagtgcaattgaaagtggtcattacaatcctaatgaacaatacaagtctggagcagtcactgttcagggctcaacaattcatgactggaacaatagtgggtggggaagcattccatttagccaagcatttcctcgttccagtaatgttggttttgtaaaacttgaacaaaagatgggttcaaaaacttggaaagaatatttgaataaataccgaatcggtaaaaagacaggggtaacgcttcctggagaaaccgcaggtattttaaacttttctactccgttgaatcaggctgttactgcatttggacaaggggttaatgttaatgcaatgcaaatgatgcaagcatatagtgccttggccaataatggtcagatggtaaaacctcaatttgtcgaaaaaatagtttcaccttctggtaaagtagtagaaaagtttcaccgtacaaaagtcgggacacctatttattctgctaaaacagctaaaactgttctaaaaggaatgcaagatgttgtaaacgcatcttacggtactggtgcagcttataaaatgccaggaaagagcatcgctgtaaaaactggtacggcacaaatagctggaccgcatggtggatatttgactggggataataattatattttttcagtagttggggtaacacctgctaataatcctcgttattgtgtttatttaaccatgaagcaaccacaaaaaatgtccaaaccagctgaaacaattctttcttctatttttaaaccaattatgaatcgcttgatttcactttctgattcttcagcaaaggttaatgaaaaagtaactgttccagctttaactggtaaaagtgttgaaaaagcaaaagaagatgctaataatgcaggagtttcagttgaagtgattggaactggaaagaatgttagtcggcagtcagtaggagccggtgtaaaagaagataccgatacaaagattttcctatatactggaggaaaagttacatgtccaaatatggttggctggagcgaagatgaagttaatagcttcatgacgacaactgatattccaattacgattaatggaaaaggaaaagttactaaacagtctattccggctggaaaagtaattgataaaaatagtaagctatctgtaaacttaaaatagtaaaagttaaaggagtaatacaaaatgcagttttctttgataccgttcattagcagctttgctcttacggttatcttcttaccgttgtttattggtttcatgcgaatgaaacatgaaggacaagttattagagatgaaggccctaagtggcatgagaaaaaatcaggtacaccaactatgggtggagtagtctttatgcttgccggtgttatttctaccttatgggtgttgatttggcaaaaagatttaaataagactgcatggattttaattattgctttcttaggatacggaattattggctttttagatgatggaattaagctatatttcaaacgtaacttaggcttgagagcatggcaaaaattattaggacaaattattattgcagctttaattattacactagcctttagtgatcattttgcctttgaattatatattccttttgcaggaatggtaagaaattccttcctctttagtttatttgtccttttctggttggttggtttttctaacgcagttaacttatctgatggtttagatggattagcaactggtttatccattattgcttatgctacttatgcttggatagcttaccaagaaagaaattgggttatcgttgtatttactctcagtgtaattggtggtttagtaggtttcttcattttcaatcataagccagctaaaattttcatgggagatgcaggttcattagctttaggtggaggattagccactgtatcgattttccttcatcgtccatggtcattgctgttaattggaattgtttttgtattagaaactttaagtgtgatcttacaagttatttccttccaaactactggaaagagaattttcaagatgacaccaatccatcaccatttcgaaatgcttggctggtctgaatggaaggttgatattgtattttggattgttggtttaattggaagtattatttatttaattatctggggttaattttaaaatgaaaaaaattaagacatacgaaaataaaaatattttgattttaggcttaggaaaaagtggtttttctgttgctaagcttcttttaaagcttggcgctaagctgactttaaatgataaaaaagatttgtctaacgatgatcgtgctgctgaattaggcaagttaggagttagagttatttctggataccatccagtagagatctttgatgaggaaaaatttgattatcttgttaaaaaccccggaattccttatgaaaatccaatggtagagaaggcagagaagttagatattccagttattaccgaacctgaaattgcacttaatgtcagtgaagcaccatatgtttgtgttactggctcaaatggaaagacaactacggtcatgcttacccaaagaattatggatcataatttatctaaaaatggtggtcatgcttatgcagttggtaatattggtgttccaatttcagaagttgttgaaaaagcaacttctaaagatctcctagtagtagaaatgtctagtttccaattacttggggtaactgatattaagcctaaagtagctgccattgttgatatttataataatgttcaccttgactaccataagacttttgacaattatgttgaagctaagcttagaattactcaatctcaagatcaagatgattatttcattgctaactttgatcaaaagaatattttagaaaaagagcttgataagacaaaagctaaggttcagacattttcggaaacagataaaactgccgactattttattggtgatgaatatcttgaaagcaaagacgatcatcacattatgaagatcagcgatatcaagatcccaggtattcataaccaacaaaattgtttagtagcgattgccatttctaaattaatgggtgcagatgatagtgacattcaatatgcattaagtacttttactggtgcgactcaccgtttgcaatatgtaatgacttataatgatcgtaaaatttataacgattcaaaatcaacgaatattgaagctgctactgtagcgattccatcatttaaagagcctgaggttttgattgcgggtggattagatcgtggatttatgtttgattcactagttccactatttaaaaagcatgtaaaatcaattgtactttatggcgaaactaaatatcttttagctgatgccgctcgtaaagcgggtattaaagatatcgtaattgttaatactttacaagaagctgttccgcgagcatatgaattaagtgaagcaggagatgttattttgttttcaccagcatgtgcatcttgggatcaatttaacacttttgaagaacgtggagacttttttgtaaaatttattaaggaattaaagactaaataaaaatgagagtaattttttctggtggcggaactggtggccacatatatccaattatggcgttaattgaacgtttgaaagaacgtaaattagttacaaatgatgaaattttgtttgttgggactgatcgaggattagaatcgaagattgttcctgcggcaggagttccttttaagactttaaaaatcaaaggatttgatcgaaaacatcccctaaagaatttcgaaacaatcgaattatttattaaagctacaaaagaagcaaaacaaattattaagaactttaaacctgatgtagtcgttggaactggtggatatgtatcaggtgccatagtttatgaggcagctaaaatgcatgttccaactatcattcatgaatctaattcagtagttggactagcaaataagtttttagctcattatgttgataaaatttgttatacctttgatgatgctgcaaagcaattttcagagaaaaagaaattagtaaaaactggtaatccacgctcacaacaagttcttggtttaaataaagaaaacattgatattgctaagaaatgggatttaaatcctaacatgccaactgtacttatttttggtggctcacgcggtgctttagcaattaatcaaatcgttgaaaagtctttatcagagcttgaaacaaaaccatatcaggttatttgggcaactggacaattgtattatggtgatgttaagaaaaaattagccggtaaagaagtgaattcaaatataaagattgttccttatatcgataatatgcccggcttactaccacaaatgacatgtgttgtagcacgatctggagcaactagtctggctgaatttactgcccttggtgtccctgtaattttaattcctagtccaaatgtaacgcataatcatcaaatgaaaaatgcgcttgatatggaaaaagcaggagctgctttagttattgcagaaaatgatttaaatcctaataactttgtttcatcaattgatcatattctactcgatacaaattatgcaaagaagatgagtgaagcatctaagaaattaggtgttccagatgcatctgatcaagtaatttcggtgatggaaagtctaattaaaaataaatagtgaaagggagtgaggcatgtggctaaaagaaaaataaccaaaaaagatcctaaaaaagaattatcaggatggattgattataaaaataagacaaacactaatgaaaaaagacgggtctctgcctcactaactaaattgcaagctgaacgtcggcatgctttattgactcgattaggttttataattttcttttcactgtgttgtattttagctttaggatactatatttctccaaaagcaaatgtagcaagcgtgcaggttaaaggagcgcctgaattaaatagtaggcaagtagtaaagactgtaggtatttctcctgaaaacaaggttgtcttttgtctcctaaaaggaaaagaatacagtaaaaaactatcagctacttttccagaaatagaaaaagtacaagtgggcgtccaaaaagcaaatcatttgattttaaatatcaaagagcgaccagtaatcggatatattcatgaaggtgacggctatcgcaaaatcttggcgactggaaaagtaggtagccaaattatcgcaagtaacaaaattgataaaaataagcctttgtttactggatataatcaaaaagtctctcttagcgaagatatcaaggtttatgccagtcttccacaaaatatccgtgaccaagttaaaatgctgagtggtgaaacacgaaggccaacgcagattattttggtaatgaaagataataatatagttattggaaatctttctaccattaaaggtaagatgcgctactatgacaaaattaaaagtcagctaagagaaccatctgtaattgattttgaaattggtgcttatagtagaccgctcacacaggcagaaaaagtcaaattaggactgacttgatattagtgagaacttaaaccatatgttaaaatttattgtatagttatgttttgggggcattaccttggataaaactgatttacttgtaggcttggatataggaacaacaagcgtaaaagcagtagtcgctgacactgcatctaatgaaatgcaaattattggtgctgcaaatggtcctactaaaggaatgcggcatggaaaaattgttgatattgatcaaactgctgaaagtattagtgctgttttaaagaaagtagcgcaaaagacaaattcaaagatttatcgcgtagtaactggaattccagttggattgcttcaattagaaaatgctgttggattaattaacattgaagaaaatggcagagaagttactgataatgatgtaaaacgtgttttagtaactgctattgatacagcattaaaagatggccgagaagcaattgctttcttacctaataaatttttaattgatggaaaaactgatgtagatgatccgagaaaaatgattgctcattcactggaggtacacggtatattattgacggcacctagtgcagatttacataatattcgcaaggccatcgaaagagcaggatatcagaataatttctttgtacctacaccgttagcaattgccagtgttgctcttgatgaaggagaaagaacctttggtacagttcttctggatctaggtggaggatcaactactgctactgttattcatgaaaataagattaagtatgcgacaattgatttagagggtggaattgatattaccaatgatatttcagttgttttaaatacttcgaaaaaagaagctgaaaaaatcaaactacaatttggttatgcagatccaagcttaacttctagtgataatcaatttccagttaatgtagtgggtgaaaatgcgcccaaaatgattgatgaagagtatttaagtgaaataataaatgctcgtcttgatcaaactttcagtcgaattggaaaaggattaaaatctcatgatgccttcaagttgccaggtggagttgtgattactggtggaagtagtgcactccagggaattgatgacattgtaaaagaagattttggcgtaaaggctagaatttttcaaccagatcaaatgggactacgcaatccaatgtacgctgctagctatggagtagtaaattatgcttatagtttggctgatattgattacttggttaacagtgttatttatggaaaccagattacgtctccggtttctaatcaatcttcgtctcaagaaaatatgaaatttttcaaaagacgcctaactcctagtgaaatggagcctaaagaagattataataagactagtgctacatcaacggtctctacgtctgaagagaatgatgataataagaataataaaaaaggaatcaaagaattctttaagaaattttttgattaaataaggtggtttagtaaatggattttactttcgattctgatgacaacaaaaatgcagtcattaaagtaatcggtgttggtggtgccggtggtaacgctgtaaaccgaatgattgatgaaggagtacaaggagtttcctttatcgcagctaacacggacgtacaagctcttaatagtaataaagcagaaaataagattcaacttggacctaaacttactcgtgggttaggtgcaggttctcatcctgaagttggtcaaaaagctgctgaagagagccaacaaacaattgaagactctttaaagggcgctgacatgatctttattactgctggtatgggtggtggtactggaactggtgctgctcctgtaattgcaaagattgcacgtgaaactggagcattaactgttggggttgttactcgtccctttacatttgaaggtccaaagcgttcaaaaaatgcggcagaaggaattgctcaattaaagcaatatgttgataccttggttatcattgctaataatcgtttattagaaatggttgataagaagacaccaatgatggatgcgttcaaagaagctgacaacgttcttcgtcaaggtgtccaaggtatttcagatttaattacttcaactgactacgttaaccttgactttgcagatgttaagactgtaatggaaaatcaaggtgctgccttaatgggaattggtcgtgctagcggagaaaatagaacagttgaagctactaaacttgctatttcatctccattacttgaagtatcaattgatggtgctaagcaagttctgcttaacattactggtggaccagatttaactttatttgaagcgcaagatgcttctgatattgtttcaaaagctgctggagatggtgtaaatattatctttggtacgtcaatcaatgcaaacttaggtgatgaagtagtagttactgttattgcaacaggaattgactcaaaggctgaggaagaagcttcaaaacaaccaatgcgtcgtccttcacgtccagcacgccaagaagtagtaactccagaacctacaaagagtgaacaaccagaagtatctaaggctgcttcagtagatgataccgaagttaaggttgcaaatactatttctcacgaagctcctactcaatctattcctgaagtaaaagcagaaaagaaagaatctcaagatactttacttgaccccacaagcgtttggaagcaagatagaaaagagaacaatcgtccacaacctgtagagaataaagaaaaagatgacgatgaatttgattcatttagttcagacgactccactagtatttctcaaattgaaactagtgtagatgatgaatcagataatgatattccattcttcaaacatcgtcgtcaagattagtatttggaggaagagattatggctttcgataaattaggtagattttttggtatctctgaagatgatgaaatgaatgaagtgccatatactgaatcagaggaacagcaagaagaaatccctcaaactcaaaaaaatgagagaagagcaaatgttgtttctattaattctggtgttagtgctacgagtaaaatcgttttatacgagcctcgtgtatattctgatgcaaaagaagtagctcaaaatcttctaaataacaaggctgttattattaattttgcacgtatggatgatgaacaggcacgtagaattgttgattttattactggtactgtttatgccttaaacggtgaaattcaacgtgtgggggacaagatcttcttagcaactccaccaaaatttgaaactgatggtaaaattgctgaattggttgaaaagaaagataaaatggattaatggtattttcaattataggctggatattacgcattatttctgatttattaaatatctatagctttctaattgttatctatactttactaacttggatcccaagactacttgtgactaaagtggggcgagtactagggaaaattgttgagccttatttggagatatttgaacgttttattcctccaatagctggaatttcctttgctcccgttgtagctttgttagtaatttattttgtaaataattatgtcctttattggatagcaaatataattaggtacgtgtttattagataaaatggaaaaaagacaagctagtagtttttatcaacattttgatgaaagtgaaagaccgacggtggattatttcgtcggtctttttaatcagtttttatttaaaaatgaaccgattttaactgattttcttaatcctagagaacaatatatttttcgagaaatagttggaggatatgcacagttatatagttttggcggcttttcgaatgcggaaaagaagcgaatgcttttatgtgattggagtgaagggtacaagcccgatgaattcaatatttcgcttttagaaattgcttatcctcaaaaatggtctgaactcactcatagtcaaatcttaggtgttttgacgcacctaggaattgaattagatacttttggtgatattatcaatgatgaaaacggaaattggcagttcttcattaaagctgaattgaaagattattttcttgaggaaattgatcgaattggaagaacaaaagtgaaattatctgaactgcccctatccaaagttttagtgcaggaagatgatagcgaagaaatgacttcagtagcgatctcacttcgacttgatgctgttatcagtgcgattacgaacttaagcagaagccaagttaagaaaattattgaagcgggagaagtgaaattaaattggcatcttgtaacacaatctaatataattatttctgtacaggatatgcttagtattcgccattatgggagatatgagattattaatcttgccactacgaagaaaggtaaaaaaagacttgaaataaaagtatggcaagcaaagaaaaggtgataatatgacattaacgccaatggatatccataataaggagtttagtacaaaacttcgtggatatgattccaagcaggtagatggttttttagatcgaattgttgatgcatatggggatgcactcgatcaaattgttgatttaaaaaatgaaaatgttgaactaaagaaaaaagtagataaatttgaaaaggttaaagattcgattaatgagtctttaatttcagcacaagaaaatgctgaagaaattaaaaaaagaacaaataaagaagcacaagaaattattcaaaaggctaaccaagacgctgacgaaatagttaataaagctcgagatgagggcgagaaaaaaagagctgaccttcaaaagcaatatgataccttaaatcatgattatgagttacttaaggcaaaagtagaagattttagagaagcagttcaaggaatgttaaaagatcagatcaaagaattaagtgattctgattggcaatattacctagataaatactatggccgctcccgcttatatccagctgatgggtcacagcctctcgaggatgagcaaattccggatggaccactagaggatgaagtgccgtctgaagaaactaattctgctatttcagaggttgacaataatacagtaaatgaagtaaactctattcaagaaaaggaagatagtgctgaactcttagatggagaaaactctgttaaggaaagtatgcatgctacggaggaaagttctgagcgtcgcgatggtccagtaattatttttcctgatgatttaaaagataattaaaatttaagtcgacagtaacaacaagtagataccttagcgagttagtgatggtgaaagactaacaactttcgaaagttaatcagctgccaattgacttaaacgttttctgtacgatacacagagaataagtggaatagggtaagtgtaccctattcaatttaggtggtaccacgagaagcttcgtcctatttgggatgaagctttttttgattaagaaaggattttttatgagagtcaaagatacattgaatttaggtaaaactaaatttaaaatgcgcggtaatcttccagttcgtgaagctgaatggcaaaaagaatgggaagaaaataaattatatgaacaaagattaaaacttaatgaaggcaaaccccgttttgaccttcatgatggtcctccatttgctaatggtaatattcacatgggacactccttaaataagatctcgaaggatattatcgttcgtttcaaaaatatgaatggttactatgctccttatgttcctggatgggatactcacgggcttccagttgaacaacaattagctaaaaagggcgttgaccgtaaaacaatggatcgggctaaatatagagaactttgtcgccagtttgcggaagaacaagttcaaaaacaaatggccgacttcaaacgcttaggagtaatggctgattgggatcatccttacattaccttacaaccaaaatttgaagctgaagaaattagagtcttcggtgaaatgtttaaaaaaggttatatctataagggtaagaagcctgtttactggtcttggtcaagtgaatccactttagctgaagctgaagttgaatatcatgacattaaatcaccaagaatctatgttgcttttccaattaaagatggaaagggtattctagattcagatacttcactagtaatctggactactactccttggactattccaagtaatgtcggaattactgtaaatcctaaatttgattattcagtagttgaagttaatggtaaaaagtatgtcatcggttcacaacgtctttcagcagttgctgaagatttaggttgggaagattataaggttgttaagaccttaaagggtaccgactttgatagaatgacttaccaacatccactatatgatgtaactggggtgataatgaatgatacttatgttactgctgatgatggtactggactagttcataacgctactggttttggtgaagatgactacaatgtcgggcgtcgctatggcttaccagtatttagtccaatggatgcacaaggtagatttactaaagaagtgcctgatccagacttagtgggaatgttttatgatgatgctaataaagttgttgccgataagcttgaaaaagctggcgcactcttaaagcttagcttctttactcactcatatccacatgactggcgtactaagaaacctgttatttaccgtgcaactactcaatggtttgcttcaattgacaaatttagagatcaaattttagcagaaattgaaaaagctaatttcatccctgcatggggtaagacccgtctttacaatatgattaaagatcgtggtgattgggtaatttctcgtcaacgtgcatggggtgtaccacttccaattttctatgcagaagacgatactccaattgttactccagaaactattgaacatgttgctcaaatctttgaaaaagaaggttctaatgcttggtacacttatactgcagaagaactacttccagaaggatttaagtcagaacattcaccaaatggtaagtttagaaaagaaactgacatcttagatgtttggtttgattctggttcttcttgggctggtgtaatgcaagagcgtgatggtttaggtttcccagcagatttatatcttgaaggtagtgaccaataccgtggttggtttaactcaagtttaattacttcagttgctgtaactggtaaagctccatataagcaagttttatctcaaggttttgttttagatgacaagggacacaagatgtctaaatcattaggtaatgtaatttcacctaatgatgtaatcaagcaaatgggtgcagaaatcattcgtttatgggttgccggagcagatactacttctgatgtagcagtttctcaagatattttacgtcaatctgctgaaagctaccgtaagattagaaatactatgcgtttcatgcttgctaatacttctgactttgatcctaaggaagatgcaattgcttatccagatatgtccggtgtagatcaatatatggaaatcaagttaaatcgcttgatcgaagaggcaattgaagcatacaataagtttgattttaatagtgtttataagaaagtatttagcttcatttctaatgatttatctgccttttacttagactttgctaaggacattctttacattgatgctgaagacagtgaaactcgtcgttcaatgcaaactgtaatttacgatgttttagttaagctaactaaattgatgacaccaatccttccacatactatggaagaagtttggggttatctcaaggaaccagaagattacgttcaacttgctaatatgccagaagtagaccattttgctaatgaggatgaagttttagcagattggaatgcctttatgaaagttcgttcagatgtgttgaaggcacttgagaaagcacggaatgctaaggtaattggtaagtcatttgaagcacacgttactctctacccaactgaagaaacgaaggcacttctcgataaattaaacgctaatatcagacaaattttgattgtttctgatttaactattagtgatgaagaagcacctgaaaatgctgaaaaattgccaactgcatccattgtagtggaacacgctgctggtgaagtttgtccaagatgtcgtcgtactacaaccgatgttggtagtgacccacgtttcccagaattatgtgcgcgctgtgcagctatcgttgctgaaaactttcctgaagcagaaaaagaaggtttagaaaaataatgcgtaaaggtactgttaaacaatttgatccaaactctgcgtatggatttattgaggatgatttaactcattcatcttacttcgttttttataagtcaattaaagaagaaggttataaaaaactgaacgtaggtcaaagagttcgttatcaattagcgcaaggaaaaaagggtctacaatgtatcaacgtttatgttgatcatgactaaaaggagaaattaagtgaatctgagagaaactgaaatctcaaataaacctattttcgaaggtaaacttattgatttaaatgttgaaactattagtttgcctaatggaaaaacagctactcgtgagatagttaagcatcctgatgctagtgctgcaattgccatcaatgatgagaagaaaatgcttcttgtaaagcaatggcgtgagcctattaaacaattaactttggagattcctgcaggtttaattgatgagacagatgcttcacctcttgatgcaatgaaaagagagttgaacgaagagggtggctacaaggccgagtattgggaaaaggtaagtgaattttatacatctgttggtttttgtgatgaaaaaattcatttattctattgtgatactttgtcaaaaattgaaaataaacgtcctcttgatgaagatgaatttttaactcaagaatggtacagtctgccagaattaaaacagttaattgcttctggagaaattatggatgcaaaaactgtaatggcaattacattttgggaaaatatgattttaacaggaaatcaaagtaatgactgaaaaacgagcagattatcgtaaaaagcaacaaaaagaaaaagtaagcaaaattttcgataattttaaacgattgaggaaagataagcatcaagctgatgtaagtgatcaaaaagttgaggttcaagattcttcaaaatttgaatcaagagaggatctcgcaaatcgtgctttaaaagaaaagcgtgaagataaggttgatcgtttaaaaaaacgtctgaactatgcgattttaattgttgttgttttgttagttatagttttgttcgctttgtttaaactgtagatttagaggtaagaaatgaaaatcgcaattattgtcccaatggaagaagaagcagaattctataaaaagcattttaagtctgaaaataaagaagtttttggcacaactgaatttgatcatttttcagtaaatggaaatgacatttacttaggattaagtggaatcggtaaagttaatgcagctatgaatttgactagcctgttaactaaagaagatattgatgtaatttttatgactggctctgctggatcactgcaagaagatgtaaagagaaaagatctaattttgcctaataagtttatgtactatgatgctcataatactagtgcaggtaactatgtggaaggacaaattccccaggaacctgcaggctatactctggataattcattccgtacaaaatttgcagcatatttaaaggaacatgatattccttttaaagaaggattgattgtaactggagatagttttattgcttctgaagcacaaaaagatgagattaaaaagaatttctctgacgcattgggagtagagatggaaggagctgcttttgcacaagtagctagacattttaatactccattggttgcaattcgtgctatttcagataatggggatgctaatgctgacaatgactttgataaattcgtcaaggaagttggagcaaaagctgcaagtataattgcatcctatcttgaagaaacagttttagattaaactattgatagactaagttcatcgtaacttagtctatttttatgttaaaataaaagagccacttccgaaatgtaaggaaagtaaagaggttataagataatatgactaggaaaaatgtatacttagataacgcggcaactacgccaatggatccaaaagttattgaaaaaattagtagtgaaatggctgatgattttggcaacgcttctagtcaacacgcatttggtcgtaaggcacgtcatgtagttgaaacagctcgtcatcaactagcagaaacaattaatgcccaagataaagaaataatttttactagtggtggctcagaaagcaataatactgctatttttggtacagtacgtgctagaaaagatattggtaaaaaaattattactactaaaattgagcatccttctgtcttaaatcctatgaaacgcttagctcaggaaggatacgaaattgtctatcttgatgtcgatgaaactggccatattaatttagacgacttgaagagagaactaacaccagatacaatcttagtttctattatggcagttaataatgaagttggatcaattatgccgttaaaagaaattggtgaattagtaaaagattctaatgcatattttcatgtagacgacgtacaaggcttcggaaatattgaaattgatgttaaagaaatgaacatcgacttattatcaacttctgctcataaagttaatggaccaaagtttttaggttttctttatgaaaaaaatggtctaaaagtaagtaatttacttttaggaggcgaacaggaaactaaacgccgtcccgggacggaaaatgtaccaggtattgccggctttggtatagctgctcaagaactaaatgaaatggataagcagaagctgcaagagaaataccaaaactttcaaaaaataattctggatgaacttgataaaaatcaaattgattatgaagtcaatggaactcttgaaggcaaagtatctcaccatgttttgaacttatggctaaaaggtgtaggtacttactctgccttaactaatttagacttaagtggatatgctgtttctggtgggtctgcatgtacggcaggttctcttactccttcacatgtcttacaggcaatgtatggggaagattcaccaagaattgaggaatcaattagaattagctttggtagatttaatactgaagaagaaattcaagaatttgcagcagatttagttaagatgtgcaagcgtctagataaatagtaaaattatttttttgagaatttgtcttaaggtataataatagtaaaatcatatacttgacacttacaaaaaataagataataatattgagagtgatatttttatggcaaatacagtaattattaacggcgataatcgtaaatttacgattaatcctgaaattaagcgttatgcattgattgatgcaggtttcacaaaaactaaaagaggtaattttatgtataagcatcccttatataatgagtccccttataatgctacctgtcaattaaagctaacaattaatgaagatttagatcatttaacaatggtagttacagatactaatggtttgcaaaaggttaatatttttaagaataaacaactagcgccaatggttgaactgcttaacttcattttaaaggatcttgaagatcgccaaattattgcaccttgctaaaaggagaaaaagataaaatggtagataacagcaaaattagagtcgttgttggtatgagtggtggagttgattcttcagtttctgcacttttactcaaacaacaaggctttgatgttgtcggcgtcttcatgaagaattgggatgatactgatgattccggagtttgtacggcaactgaggattacgaagatgtaaaaaaagttgcagatgaaatcggtattccttactattctattaactttgaaaaggattactgggagcgcgtatttgaatatttcttggatgaatataaaaagggcagaactccaaatcctgatgtaatgtgtaataaagaaataaaatttaaatctttcttagatttcgcaatggatttagatgcggattatattgcaatgggtcactatgcagcaaccagagttgacgacaacggtgttgttcatatgatgcgtccaaaggatggcaataaggatcaaacttactttttaagccaactttcacaagatcaattgaagaaggtaattttcccacttgctaatttaactaagccacaagtacgtgaaattgctattgcttcaggattagcaactgctaaaaagaaagattcgacaggaatttgtttcattggtgaacgtaactttaaaaaattcttgagtgaatttttaccagctcaatcaggaaaaatggttactccagatggaaaagttgttggtgagcacgctggtttaatgtactacactattggtcaaagatccggccttggtttaggttcaactaaggaatcaactgatccatggtttgtagtaggtaaggacctaaagaagaacgagctaattgttgaacaaggttatgacagtaagcttttatatgctactagcttagatgcaagcggtgtatcattctttacaggccaaccagatcacgacgttgatttgaagtgtactgctaagtttagataccgccaacctgatgttggtgtaactatgcactaccgtgcaaaggataatacagttcatgttgagtttgatgagccagcacgtgctgttactcctggacaagctattgtgttctacaatggtgaagagtgcttaggtggagctacaattgaccgtgcataccaaaatgaaaagcaattacaactagtatagtttagaagaagtctcttttgaggcttcttttttatttttataaactgttattttctcctcttaaaacttataatagtaataaaagtggagggaaaagcaaattatgcaattatattttgtaagacatggaaaaacaaaatggaacttagaaggacgctatcaaggtggtagtggtaattcacctcttttgcctgaaagttacgaagatatcaaaaaattagctggatacttaaaaggaacaaagtttagagctttttattctagtcctttacagcgcgcattaacaactgcagtaatgcttagagatgatatgggaattactgtcccagtcattattgacgaccgtttaaaggagttcaatttaggggatctggaaggaatgaaatttgttgatgctgaaagtaaatatccagatcaaataaaagcatttcggtattttcctgatcgttatgatccatcaactttccatggtgaaaattttgaccatatgataaaacgtggaaagaaattgattgctgatattgtaaaaagatatcctaacaaggatgataaagtattattagtaagtcatggagctgctttgtgtgccttaattagaactctagaggggtacgatattgccgatattagaaagcgtggcggcttaactaatacaagtcttacaattcttgatacggaagataatggaaagacttttgatgaagtagcgtggaatgaaacaagctacctagatcgaaaaattactagtagggatacaatttaaaatggataaaaagatagccaacttatatgatactggcaacgtagataaagctatacatttattaattgaaaagataaacaaacatccccaggatattgagaattatttgcagctttcaacttatttaattgaacaaaatgctgctgatcaggcgctagaactgttagaaaaagctcgtggccttgttaagcatcctgaagatctaacctataacattgctgtctgctactacatgcaaggagattttgccaagtcgcttacgttgcttaactccattgcagatgatgaagagacaatgtatcaaaaagctttgatctttatgaaattagggcagtatcaaaaggcactagcctatgccttaactttaaagaatcaggatgagcgaactttagaattaattggtgatatttggcttagtttgggtgatttaaaatctgcaaatcaaacttataataaaatttcagaagaccaaagaaatgcaaaagttaattttttattggggttaactttatttgatactaatcctgatgaagcagaaaaatattttaaattatcaaaaaatcaagatcccaaatattttgctcaagcacaaaagcaatataatgcggtagcaaaattgattagaggtaaaaatggcagaaactagttttactggacgaataaatggaattgtttttgaaaacaatcaagatcttttcaagattattgatgtagatttaatcagtaaattacctgattacgatcgtgataatatccgagtaactggaaattttggggatatccaaattggatcaacttataaatttaccggtaatattgtcgtgcacgaaaaatttggtaaacaatttcgtataaggtcttatgaaccagttttgcctcatgaagagggtagtttagctaaataccttagttctgataagtttcctggaatcggtaagagggctgctgaaaagatcattgatagtttaggaaccaatgcgttagatttgattaagtcaaatccaactgaaattgacaatcttgatttaactcaaaagcaaaaagatagcttattatctggaattaatcagatggattctttttcagagattgtgattaagctggctagatatgggattaacaaaaaagtagctggtaatatttataaagtatatcatggtgattccttgaagaaattagaggaagacccttatcaagctcttggtgaagttcgcggctttggttttaaaactgcagacaatatgggacacgcgctcggaatagaactaaatgatcctagaagagttaggggagcacttctaagtattttacagactgctcttaataccttgggagatacttatgttgcacttgatgaattattaacacaggcttatgatttagttcaatctacctcttatgatgagcttgctaatagtgttaatgaacttcaaaggcaaggaaaagttgttgtttcaggtgataaggcagctttgcagacaatttttcaaactgaacttgatatagccactgaattaaaacatgtagttaataatcaagtcgaaaaagaagaatttgatgatagcgatattgaaaaagcaataaagcatgtcgaagaaacacttgaaattgaatatgatgatactcaaaaaaatgcaattaaaaatgcgttaaataatccaatttcaattcttactggtggtcctggtactggtaaaacgacaattattaatggaattttaatgtgtttaaaggaacttgcggaaattccaagtgcagctttgtatagcgatgatccaccatttttacttgctgcaccaacgggtcgagctgccaagcgaatgagtgaggttacagatatttcagcgaaaaccattcaccgtttattagggttaggcatcggtgaaaatgaagcgactgatgtaaacgaattaaacggtgagatcttaattattgatgaaatgtcgatggttgatatgtttctctttaaacagcttttatccggtattaattcaacaaagaggatagtttttgtgggggacaaagatcagcttccttcagttggagcgggtaatattttcagcgatttaataagttcaggggcatttccaactacaaagttgcaagtaattcatagacagggagaagactcctcaattattaagttggcccatgcaattaatgatgaagaagcagaagagactatttttaataaaactaaaaattactcctttattccatgtcaaccaagcttggtgggggatgcaatcgatcaaatcgtaaatttggctattaaacgtggtttcaaaaaggatgatattcaagttctgggagcgatgtacaacggtcaaggtggaattactcacttgaatgatattttgcaggatgtgatgaatccactatcagcaaaaactaaagtaattgaagctcacaatgaaagttttagaatcggggaccgaatcctacaattacaaaataatccagaaaaagatatttataatggtcaaattggtaaaattattggccttaatcctgatgataaagccaaaatattaattgctgattttgacggtcgtgaaatagaatttggtattaaagacttaaatgatattacccgtgcgtatgccattaccatccataagtcccaaggatcagaatttccgttagtaattttaaatcttacgatgcaaaattatatgatgttgaggcggaatttgttatataccgccattactcgtgctgagaagaatttagttatggtaggagaaaaaaaggcgtatattatggcattgcgtactccaggtaatgaccgtaagactgagttagcagctaaaattaggtatgagttaggtctaaaagaagttgaaaatacttcaaatgtaaatgcggaacaagaaaaaaacaaagctgaacttaaagaagaaaatgttgagccagaaaattatattttgactcctgagctaatttattctggacagattgatccaatgattggaatggaagatattagattagaagaaaaaagatagcaaaatagccagctcattatgagctggctatttgtcgtttattgcaaaagatcaaaatgatccacttcaaattttagatgaaactttctttttgataattcttctccatctaactgaccatactcaggatcatcagttttaacttcaattgcagatgattcaaaataatgaaattggttacttttcatgtgtgatccattaattagcaacttagaaaataggtaaataaattttactaagtttggcttttctacaattgcaatatctaagtgatgattgtgaatgctagcaatcggtaagattggtacgccgccaccgaagtagggatggttagtagtagtaactaaataggcgtgttcatagtaagaggtatgaccattggttgaaactctgaccttaaaattgtcttgtcccttgagcgcttgaacaatattaattccgtaagttaagttacctatattaattttattaaatttagtttttagttttgagtggttcgttttattaactacataagcatcaaaaccaattcctaaattgttaacaaagtatcttgtctcaccgttaattagatcatggtattttccgcaatctactttagtaacggtcggattattttttagatgtctaatcaattttagaagatctgtttcaagtttagctgctctagcaaaatcatttccagtgcctgctgggaagtaggcaaggggagtgttaggctgctctgaatttttaacaccatttaaagcttggtttagagaaccatcgccaccgactacaataacatattcatttctagaactaatctcattggctaccttggttgcaattggaaccaattgtcccggataattggagatatgaatgtcatagtccattttttcatttttaagtacagtttcaatttgcttgagagctttttcgcctctattgctccctgattttagatttaccagtaaatgaatctttttcattattttttgcctatgtaatataaaaataagccccgagatggggcttactttatttcttttcaattagcattggcagaatcattggtcttctttcagtctttgaatataggaaatcttgaagattctcaataattgcctttctaatttcattttcttttggttgtggatctttcgccatttctgtcttaagaacatggtagacatgtttctgagcttgactaatcaattctgttgattcacgcatgtagacaaaaccacgactcaaaatgtctggacctgcaagaacgcgttggtgtttgtagtcaacagttgctactactactacaagcccttcctcagccaagatttggcggtcacgaacaacgatattaccaacatcatcgctaccagaagtatcaacaaagacatctggtatattaatgtgaccagcaattctagaagaatctctcgtcaaagcaaggacatccccatttttaagaacaaaagtatgatctttaggcataccagtagattgagcagtttccgtatgaactacttgcattctatattcaccatgaactggaatgaagtattcaggtttagttaactcaatcatcattttttgttcttcttgtccagcgtgtccagaagtatggacattatgaatcttaccatgaacaacattagcaccagcttcagttaacttattaattaggtggttaacgctagtagtgttacctggaattggattagaagaaaagatgactgtgtcgcctggttgtagtgaaatctgacggtgagttccatctgcaattcttgaaagagcagcaagaggttcaccttgagaaccagtacataagatcattgccttttcaggtggagtatggttaatttcattagcatcaactaaggttccttcaggaatatctaagtagccaagatcaataccattttgaaccccattttccattgaacgaccaaagatagctacttttcttccggtatcaacagcagctttgatcgcagttgatacacggtaaagattggaagcaaaagtggcaaaaataattctgcctttaattccagtaatgatgtcgtgtaatgaatgagcaacaaatctttctgactttgtaaatgtaggaacctctgcattagtggagtcagataaaagtgctaagacgccttcttttccgagtttagccatctcttggaaatcaggagctggttgattcataactggagttaagtcaaatttaaagtctccagtaaatagaacggctccttcaggagtatgaactgcaattcctagagtatcaggaattgagtgagttgttctgaagaaacttactgataacttatcaaattttaaaacagtatcttcatgttcttcatgaagttcactagagtttaaaattccatgttcatcaagttttcctcgaattaaggctaaagcaaatggagtagcatagacaggaatttcaggaattttctttaaaaggtaaggaattcccccgatatggtcttcatgtccgtgcgtaacaactaatgctttgattttttttctattcttaactaagtaggaatagtctgagataacataattaattcccatcatatcgtcttcagggaatttgataccgcagtccatgatgataatttcatcttggtactcaacgcagtacatattacggccgatttcgcctagaccccctatagcgtaaacgccgacttcgttattctttaatttcaaggtcgttagttatccttagaatcaaaagttgtcagtttgaaatctgggctttgcttttcgtaagcaagggagtttccagttaattcttggatgagttcaatgttgtagggggtgttatcctcaaccatagttcttgctgcaactacattatctgcttctaaaaaaagagtcttagtagtttctcttcttggattaacgatctggtctttttggtataaaactttgtagatcatttcttataatctccttatatttaaaacgttcaaaaaaacttctgcataaacttgcagaaattcatagctattaaaattttatcataaacttgcttttaagtataccaatttacttcatatatagtatggaaaaaggcgatagaacatcttgctctaacgcctagtagaaaattaaaagtttaattttaagaaattacgattgtatcttctgctaattcaaaaggattttgcttattgatgcgatcatagaataaatgaccatttaagtgatcaatttcgtgggaagcaacgattgctggatagtcttttaagcgaatagttttttcttcaccatctactgtatagtaacgaatttttaatttatcaggacgaggaacatatccttcaatgtctttgtctacacttaaacagccttcaccttcagcaagacaagttcttctaactgattcagaaagaattttaggattaacaaaaacttccttaaagatgatttcacctttgtcgtttggaactaaaagagcagccatttgaacactttcaccaacttgtggagcagccaaaccaacaccagctcttaattgatgcttttcagcaatcttaggatcttgggagttgattaagtattgcatcatgtcgtcagctaattttttgtattcatcggataatggaaaagttaaaggcttagcaacttgtcttaaaactggattgccatcgcgcgtaatatcatgcattaaaatcaaaattatatctccttaattaaataatttgctataaactataataacaattgaaagaaaagacggcaacgaccgaagtttttggtataatatttttgttaaaaataaacagttcacagcttgtacttccgttgacgacattatatttttagagtagaattgtaaaacgaaactatagagatataaagcttcaataactgcattattatttttgcgtaaaagggctgtgactggagtcacagtttttttatgaagttcggggaggaatttcttttgcaaagaagagacgatattagaaatattgccattatcgcacacgttgaccacggtaagactactttggttaaccaattgttaaaacaatcagatacattgccagagcacatgaatctagaagatcgtgctatggactccaatgctattgaacgtgaacgtggtattactatcttatctaagaacactgctgttaagtacggtgatactactattaacatcttggatacaccaggacacgctgacttcggtggtgaagtagaacgtatcatgcacatggttgacggatgtttattgcttgttgatgcttacgaaggtactatgccacaaactcgttttgtgcttaagaaggctttggaagctggcgttaagccaatcgtagttattaataagattgaccgtccaggtgctcgtccaaaggaagtattggatgaagttcttgaattattcatcgaattaggtgctagtgatgaacaacttgatttcccagttgtttacgcatctgctttaaacggtacttcttcatacgaatcagacccagctaagcaagaagaaacaatggatcctatttttgatactattgttaagaacattcctgctccagttgataattctgatgaaccattacaattccaaatcactatgcttgattgggatgactacgtaggtcgtatcggtgtaggacgtatttaccgcggaaaagttaaagttggtgacaacattactgttatgaaacgtgatggttcaactcaaaacttccgtgttactaaattatttggttacttcggtttgaagcgtaacgaaattcaagaagcaaaagccggcgatatcattgctatttctggtattaatgatatttatgttggtgaaactattgcttctgctgacaagcctgaagcattaccacttcttaagattgatccaccaactcttcaaatggactttgttgcaaacgattcaccatttgctggtcgtgaaggtgatcaagttacacctaagaaacttgaagaccgtttaattcgtcaaactcgtactgatgtttctttaaaggttgaaccaactgaccaattaaatgcctggactgtttctggtcgtggtgaattacacttgtcaattttagttgaagaacttcgtcgtgaaggatttgaattacaactttcacgtcctaaagttatttaccgtgaagttgatggacaaatgtgtgaaccatttgaagcagttcaagtagatactccagatgcttatgtaggttctgttattgactctctttcacaaagaaaaggtgaaatgaagaatatggaatctactggtaacggccaaactagacttgaattcttagtaccatcacgtggtttgattggttacaacaatgaattcatgtcccaaactgctggttacggaattatgaaccatacttttgattcatacaagcctgttgttaagaactgggaaccaggtcgtcgtaacggtgccttagtttcaatcaatcaaggtcaatcaacaacttactcacttcaatcagttgaacaacgtggtgaattattcatcggtgctggtgttgaagtttacgaaggtatgattgttggtcaatcatcacgtgaacgtgatattgctgttaacgtaactaagggtaagaacttaactaacactcgtgctgcaggtaaggaccactcagcttcaattaagactcctaagactatgactttggaagaagctattgaattcttgaacgatgatgaatactgtgaagtaactccagaaagtattcgtttacgtaagaagatcttaaacactaacgaaagaaaaaaggcagataagaaacgtaacaaatagtttatttcttatttaatttttaaaagtagctcaatttattgagctactttttttgttatgcagaggtagtgatataataagaaagattatttaactaaaggggcagatatattgtgcgacaaaaactaagatacttagactatagcatcttgatcccatatcttgttttgtcaactatcggggttattatggtctattcagcaagctcggacattttattagtaaatggtttttcaccgagtgtatatatgaaaagacagattatatatttcttggcagcatttatagcctttggaattccttgttttgctttaaaattaagagtattcaaaaacagaaaatttgttatgtcctacttaggaatttcatttttgatgttaatgtttttaatcgttcttaaaattgttagtcatggaaaagctgctgttaatggtgctgttggttggattaatttaggatttattaatattcagccagtggaagtagctaaattatctctagttctttatttggcttttgtcttgtcgagacgagatggaaagtttgttccgggacaaatctggcataatttatttgggccaactgtaatttcatttttgatgattggtttggtaattttagagcctgactttggtggttcagcaattctatttatgattgtttttgtcatgtatagtgtctcaggaatccccacaagattagccgtttattggttagtaggattactgctaggaattgttttattgatggcaattttattgttttggaccccaggattcatcaaagattcctatcaatttcagcgcttgctcgcttttgcccatccctttaagctagaaaaaacaggtggtgcacagctggtaaactcctattatgcaattcataatggtggtttgtttggtgttggattaggtaatagtatgcaaaagagaggctacttacctgaaccatatactgatttcattttatctattaccgctgaagagttaggagtaattggcgccattgtgattattaccttattattctttttaatgtggcgcattatggaagtaggaattcatgccgattcacaatttaatgctttagtttgtttcggggttgtaaccatgatttttacagaaacgctctttaatgtaggggcagttttaggattattgccaattactggggtaaccttaccatttatttcttatgggggatcatcaatgattgtgctaactgctgctttaggtttagtcttaaatatttcagctgctgaaaagaaagcattagtagaaagtaggagtgtactttgagtttggtttttaaggatgagtcaaatgaaaaaatgactccccgtacgcagataattgtttggctgaatcaaattagcgatcagtataagttgcgtagatttggtaatattatttatttttcacgtaaaaataagtatgtgattttatatgtcagttcacaatacgcagctaagacaattgcagagctcagaagcaaaagttatgtacagtctgtggaaacatcaaaaactgatgagcttgatttctctgctgaacacgaggaaaaaatgatgcgggaactaaaagaagaagcagaaaaattacgagaagaaaacgaggatttacgagtttgagaattattgcaggaaaatatgctaagcgtaatttgcatacattgaagagtaatgccactcgaccaactagcgataaggtaaaagggtctttatttaattctttggggcaattttttgatggcggtcaagtactcgatctatatgccggcagtggtgccttaggaattgaagctgtttctcgtggctatgatgaggctgttttagtagatattagtggtcaggcatgccaggttatcaaaaaaaatgttgaactcaccaaggaagaagaaagattcagagtcttaaagtgtagtgataatcgcgcaattaaaattttgcaggatgagggtaagaaatttgatcttatttttcttgacccaccttatgctaaacaaaaaattgtaaagattatgacgaaattgcttgagaataacctattaaatgagaaggcgcttgttgtagcggagacagatgaacatgatgaattaccagaggtttctggcttttcaattattaaggatcatcagttaggacgaacaaaggtaaaggtttacgaaagagattaaaatgataaaggcgatttttcccggaagttttgacccaataactaatggacatgttgaggtgattgaaggtgcatctcatatgtttgaaaaattatatgtagtaattatgaccaatactagtaaaaagtatctttttactgaaaaagaacgtttagaattggcgagaaaagtttttgaaaacaacgaaaaagttgaagttattgctcgaccagccgagttaaccgtggaagtagcacatgaacttggtgcaggcgcaattgttcgtggattgcgaaatacagctgattttaactacgagcgtgatatagctggaatcaataagaccttagatccagatttaaatacagttttattgtttactcgcccagaagatagctttatttcttctagtatgattaaagaaactgtattttttggtggggatgtttcaaccttagttccaaaaccagtcgcagctgcattggaagaaaaattgaggaatagaaataatgaaaaaaaatagaaaattaaagttttggctgctaggaatagcagcatttttaatagcagttgtattttgtctgtggccaacgcaatattatattgaagctcctggtgaagcttttcagattagtaaatatgtaaaaagtactagaaaggctaatcctgatttttatttggtaactgtaagcgaacgaccggcggtaatgattgattatttgacaagttttttgaggccggcagatagtcgctactcaaaggatgaattaatgggaacatcgactagtgcagaatataaccaaatgcagcagtattacatggaaactagtcaaaataatgctatttactatgcggctaagaaggcaaatgttccgcatcgtcaagagttcttaggcgtttacgtaatggaaataatgagtaattcgaccttcaagaacaaattgaaggtaggagatgtattagttagcgtaaatggtaagaaattcaattctagtcaagaattaattaaatatgtttcttctttaaagaagagtaaggtaagaattgaagttattagagggaagagacatctaactttctccggtgaaacggtaaaactttctggaactaaccgttacggaatcggtattcaacttgtagatcatacgcgggtagtaacaaagcctgcagtaaaaattgatgcggaagatattggtggcccttcagctggattaatgtttacgctcgaatgttatcaattatttaccggaaaaaatcttagttctaaaaagatagcagggactgggacgattgatgatcaaggaaaagtaggaatgattggcggcgttgataagaaagtaatagcagctagtcgacagggaatgaaagtcttctttgctccaactgatcaaccatcgggagttaaaaagagtgaaacgaactatgcagaagcggtaaaaactgctaagaaaattcatactaaaatgaagattgtacccgtagctcgatttgaagatgcactaaattatttagaaaaataagaaaaagcagcaaaaaattgctgctttttttcgtaataaataatgaggtgataaaaatggattttgaaaaaataaaagacttcatcttaggaaagaaaggactagtaattggaattattgcgacgattttaattggtggatattttattcaaaaaaataatcagccggtagttaataataatcaagttttaagtgaaaataataagaaccaatcaacagatttttctaaaaataaaagtaataacactccttctgctactggcgttaatagtccatctaaacaaaatactgtaactgtagatattgctggagctgttaaacatagtggagtttatactttaaaaaatggggcacgcttaaatgatttattaaaagtatgtggcggcttaaccgataaggcagagacaagagcaataaatcgagcagctcttttaaaggatcaagatcaaatttatgtcccccacattggtgaaaaaatagagaatgtaccagcagtcggaaatacaactactaactcatctgcttcagattctgctagttcaaattctgagcaggtccatttaaattctgcaacagttgaagatttacaaaaattaaacggagtgggtcagaagaaggcagaacaaattattgcgtatcgcgatcaaaatggaggtttcaaacaaattgaagatttaactaaagtgacaggaattggtgaaaagacttttgaaaagcttaaagatcaattggctctctagtttttatgctcccggattctatttattacttagtttgggaggtatttcagttacttttctaattttgcagactactacttttgcccaaagaattgtagctgtaatttttttgctttttttctgcttcttgctcatttataaatttcctcagtatcgacaattactggttttgtttttaggaataatatctcttataactttacttaatcagcaaacaagtgaaacgaaaattggagaaccaattcaaatatatagtgatcaggtgaaggtgagtgaccaatttttctatggggagggaagaattggaaagaataaagttttaattagtggaagtataaacaagtcacttgaaaaagaattaaatcgctttgggggatgttatttagtaaactacaaggcaaaagtagaacaaattatgccagcaactaacccaggtgaatttgactaccaaaagtattatcgtagtaaaaaaataagggagagagtgaaacttgaaagctatgagctttatcctaagaaaattactatttttgattggatccatattttacgtaagtggctgatcgattattttgaaaaaatgccccagtttacaagattttttgccagtgaaatggttctagcacaaaatcctagtccagaaaataaggttttactcaatagttatcgtgacttaggaattatccatttgttaagtatctctgggctacacgtaagtttatatattctagggatcatgtggcttggaacaattatgaaaagaacagaagaagagttaacgattttttgtgttctttttttaataattgaaatcttactttctaattttcaggctggttttgtgcgggcaagtttaagctacttttggaatgtattctttaaaagaaaaaaaggttatgattagtagcggagataaattaggaatagtagcgttaactcatctcctatttaatccgctattatttttaaatagtggggcgattttaagttatttgttagtctttggattagaaataagcaaagattttaaaaaaattaaacaaaatatagttcttaatttattaattacgccaattctattacataatttttatcggattaactttctaactatcatttataatttcttgattgttccaatttttaattttattcttttgcctttaacctttattgtgatttttatattttggtgtttaccagatattgtcagaataagtgaaccaatttttaaagtcattgcggacttaactaattttattgctgataagcaggtgggattaataacttttgggcaaataaattggtttcaaactatatttttattggctgtgactttgtttttgattattatgcctaagaataaagtaaagaaattaaaattaagagtaattttgcttggggcatatactagctttttctgtttgattcattttccacttaaggggcaagtttcttttattgacgtaggacagggggatagcattttaattacgacgcccttaaatagaaaaacatacttaatagatacaggtggaaaactaaattttggtaaaagaaaaagtgagccgcagttaaatcggatcactataccatttttatatgcacagggaattgatcatcttgatggagtctttttaagtcatcaggatgcagatcatatcggtgatttaaaagctttactggatcaaattccagtaaagcatctatattttgctagaggtttgactgataatcagtcttttatgaagaaaataagtaatcatttaaatgatgtgcaactgatgccacttcttgcaggggataaagttagagaaggcgggatcgactttgacgtggtttatccttttaaagcgggcttaggtaagaatgaagattctttatctataacgtttaaggtagcgaataaacgttggctttttaccggagacttgggtagagaaggagaaaaagagatacaaaatcactataatttccaagttgattactttaaattaggccatcatggtagtaaaacttctagcgatccagattttttaaagcatttaaatccacgtctagtctttatttcttcaggacgcaataatcgttttggacatccccatcaagaaactttaaaaacattgaaagacttaggtattccatatttaaatacgcaagatagtggtacaattacttggaattactcaccatttcaaggtgataagattacgactttttataaaggaaatacaaaatgacattaatctctctttttaaacagactaatcctaagaatgctaatcttttgattcaaggaccagattcattttttaatgattatttggttcgcaactacctcaatcaaaaatctttttctgaacttgatcaagtgattgtagactgccttgaagatggacttgatgaattaatggcaactttaaccgagtcttctttattcagtaaccagaaagttgtggttgtgaagaatcctttctttttaatggctaaagtaccacaaaagtttaaaaaacaagttgaaaaattaactaaaatcattgaacatttgagtgatttagaagatgtagttgtttttgtggctaattatgaaaaaattgatcgtagaaaaaagattagtaaacttttgcttgaacatgttaatgtggttgaaactacgtttaaaccctatgaagttagtggaataattaaggccataagtaaagaagagaggtatcaaattactaatatggcgcttcaaatattgatccaaagaagtgaccaagttctagacgtctcattaagtaactatgtaaaattaaaaaatattgttggtgaagataaaaggatcacggaaacactaattaatgaaaatattgatcgttctctttcagaaaatatttttgaaatattaacagctgcttttgataaaaaatatcaagaggctactcaacgtttagaggatcatttacgagaaggggcaagtgcaattcagctactagctatttttgaatctcaacttgaatttttgacttgtgttaaagttttgcagaatagacggtggagtaaagatcaaattactaaagagttaaaagtgaatccgtatcgagtaaaattagcccttgaaaataaagtctcattaagtaaattaacagtgttgttaaagcaggcgattgaacttgattttggctacaaaaacggaacttatcatggggatgagtttttgaagctctttctattaaaaatttagacaacaaaaaagctcggaggaaaactccgagcttttattttgcctaatatcaggtgtcaagtaaataattacttgttagcagccttcttagataagcgtgacttatcacggttagctttgttcttagaaataagacctttagaagcagccttatctaaagcacgtgcagctttaacttctaaatcgaggacatcttttgcgtcattttcaacagcttcgttgaattttcttacagcagttctcaatttacttaattcagcagcgttgcgcttgttagcagtagcattagtcttaacacgtttaattgctgatttaatttgtggcatcaaaatcacctcgataaaatagatttactcgttaattatacttaatacaagccgttggtgcaaggtaatttggacttgcttttttaaaaacttccatgtaatattaatatctgttggaaccattgacgctgttttcccgccgccgacggttaacgttgttaatggcaattatttaaaagagaggtatttttctaatggctatttcaaaagaaaagaaagatgaattaatcaaagaatacgcacgtcacgatggcgatactggttctccagaagttcaaattgcacttttaactagtgatatcaacaacttgaacgaccacttaaaggctaacaagcaagaccaccactcatacgttggtttgcttaagaagattggtcaccgtcgtaacttacttcgttacttgaagaacaaagatattcaacgttaccgtgaattaatcaacaagttaggtttacgtcgttaattctaataattcataaacctcagctactctttatcttaaagagtagcttttttgttcctttcaaattcatactattatatggtaaaattaattagattaacttcgttttgatcattaagatccataaataatttaagtaaatatagaaagaagcaaaaaaatgtcacaaaagattaagataatgatcttgggtggcgcacgtgaaaatggtaaaaacatgtacgctgttcaagtagaagacgaaatttttattatggatgcgggtttgaagtatcctgattcatctttattaggaattgacgttgttattcctgacctacaatttttccaagattatgccgataaaattgcaggtatctttttaactcatggtcatgctgactcaatcggtgctcttccatatattttaagagatcacgatattccagtttttggttcaaaattaactattgaattggctaagatcgctgttcaacgtgaaaatagacgtcgtaaaaatgacttgttccatgttattgacgctgatacagaaattgaatttaaaaatgcaaatgtctctttcttcaagactacgcactcaattccagattctttaggaattgatatttccactaaagaaggagagattgtctacactggtgactttaagtttgatccatcagctaaaaaaggttatcgaactgattttgttcgtttatctgaaattgcccaaaagggcgtcctcgcacttcttagtgactccactaatgctgaagctaacttcccaaatgatcgtcagactagtattgaaaaatatatttacaatatttttgagaattatgatggtcgaatcattgctgcagcaaaagcatcaaatatcgtccgtgttcaagagattttccaagcagcggctgccactggaagacatgttttcttgacaggtagagatgctggtaagattgtctatacagcaatgaaattaggttacttaaacgtacctaaaggattacttgttcacagtaaggacttaaagaagattcctgacaatgaattagtaatcttagaaactggtcggatgggtgaaccacttaaatcccttcaaaagatggcaactaaccgtcaccgtatgattaagattaagaagggtgatttagttttcattgctaccactccttcacactctgttgaaactatggttgcccagactagcgatatgatttaccgtgctggcggaacagttaaagaacttggtagagacaagcatacaagtggccatgcaactgggcgggacttgcaaatgttaattgatacacttaagcctaagttcttaattccagttattggcgaataccgtcttcttgaaattcataaagacttagccattgaagcgggtatgaataagaaagatattttcttaccacataacggggatgcatatgctttagaaaaaggacgtttctatcgtacagatgcggttcctggtgaagatatcatgattgacggttctggtgtcggggatgttggaaacatcgttttaagagaccgggaagttctatctgatgacggtgtcttcattgctgcagttactattgacagaaagaaaaagaagatcatctcggaaccacgtgtttcaactagaggatttgtatacattaaggctaaccatgccttgatgaatggcgctgctgatgtaattaaagaagcagtaaacaataactttgaacataagaaatttgattggactgaattaaagcaagatgttcgtaatgatgttgaaaaatatctttacaagcaaacaggacgtcgtccagttgttttaccagttgtaatggaagttaaccaaaatagacaccgtgcaatggctagacgaaacaaccaagaaaataattctgagaaacgtccagttagaaaaaatcatcataaaaaagattcagaacaaaagaaggcaaaagcttaatgtcacatgcaagtcaagataactttcttcttttagcaaaagaggctaaaaagcacaatgatttaccgcaagctaagcaatatttacttgaagctttacggttaggtcatgattcagatattgtttgtgagctatgtgaaatatatttaagccaagagaagggagatcaggcatattctttgattaaggaagagcctgaccttttttctaatcaaagagtatatgatacttatcttaaaattttagcttttcagcattatgcaattgaagcggctgagcttgagtacttactgcaaaaaaagctaccagtaaaaattgaaccggttagtcaaattaagcagttagaaataatgaaaaattttaaacagcttaaatatattcaagaaaaagattatttacttttatattgcttaagtacagaaaactttactaatttggcaaaaagtattttaatggatccatctcctaattttgctttgcgtttatccttatgtgaagatttagtaaaacttggatacaacgaaaaagttcaagtttacattttaggagaattaaaagaatttattcctaaagaaactgacttacttgaaaaaagtccaatttatcgtgaagtttgtgttagcttagcggattactttagacaggatccaagcaaactgccaataatgattggtgagatgaatgtttgtttagggatgctatatccgcgtttaaatgattatattagagatccggatcaatttgctcatgattttagaaattatcttgagcaaaagaagggcggagctaatcagaaacttttaaataaaatatatgaatatttggcatatgaaaaagcaacaaattctgatttttagtgccgatattgagcaaaaaaggtttacattttctgtggatctagtataatcaataaaggatattttcaaaggggtacgagctaggcttttacctttgaaagtagtataataatcaacagagaattatccgttacttactcaacggacttcttgcaaatttacaggagggtcatattaatggcagaaaaagaacattacgaaagaactaagccgcacgttaacattggtactatcggccacgttgaccatggtaagaccactttaactgcagctattactactgttttggcagaagacggtttggcacaagctgaagattactcacaaatcgatgctgctccagaagaaaaggaacgtggtattactattaataccgctcacgtagaatacgaaactaagaatcgtcactacgctcacatggatgctccaggtcacgctgactacatcaagaacatgattactggtgctgcacaaatggatggtgctatcttggttgttgctgcaactgatggtcctatgccacaaactcgtgaacacatcttacttgctcgtcaagttggtgttcaatacatcgttgtattcttaaacaaggttgacttagttgacgatccagaattgatcgacttagttgaaatggaagtacgtgacttgttatcagaatacgattaccctggtgacgatgttcctgttatccgtggttcagctttgaaggcacttgaaggtgatccagaacaacaagacgttatcagaaaattaatggaaactgttgacgaatacattccaactccagaacgtgatactgacaagccattcttaatgccagttgaagacgtatttactatcactggtcgtggtactgttgcttctggtcgtatcgaccgtggtactgttaaggtcggcgatgaagttgaaatcgttggtttaactgacaagattgaaaagtcaactgttactggtttggaaatgttccacaagactcttgaccttggtgaagccggcgataacgttggtgtattacttcgtggtatcgaccgtgatcaagttgaacgtggtcaagttttagctgcacctggttcaattcaaacccacaagaacttcaagggtcaagtttatatcttgaacaaagatgaaggtggtcgtcacactccattcttctcagattaccgtccacaattctacttccacactactgacgtaactggtaagattgaattgccagaaggtactgaaatggttatgcctggtgataacgttgaattcactgttgaattgatcaagccagttgccattgaaaagggtactaagtttactatccgtgaaggtggtaagactgttggtgctggtcaagttactgaaatccttgactaattccaaactttcttaaaaaagatgtatcttaggatacatcttttttttatacaaaaattaacaaatttctctctggatttgtgttttagcaaggtttagggtaagatagttaagtgtgcaatagcaaacccaaatttgacatcggaggtatttaattaatgtctgtaaaatgggaaaagaccggtaaaacatccggtgaattaacttttgaaatctcacaagaagaagtaaaaaagggcttagatcaagctttcaaacgtgttaagaagaacttacgtgtacctggtttccgtaaaggtcacgtttctcgtgttgtttttgatcaattttacggtgaagaagctctttacgaagatgctttaaacatcgttttaccagaagcttacactgctgctgttaaagaagctggtattgacccagttggccaaccacaaattactccagtttcaatggataagaacaagccttgggtaatgaaggctactgtttctgttaagccagaagttaagttaggtgactacaagggtattgaagttcctaagcaaaacactcgcgttttagttaaggacgtagatgcagaattaaacaagcgccgtgaacaaaatgctgaattagtattgaaagacggtaaggctgctaaaggcgatactgttactatcgactacactggtactattgatggtaagccatttgatggtggtagtgcacaaaactattcattagaattaggttctggtactttcattcctggttttgaagatcaacttattggtcacaaagctggcgatgatgtggatgttgttgtaaccttcccagaagattacggtgcaaaagacttagctggtaaagaagcacactttgctactaagattcatgaagtgaaatctaaagaattacctaagttagatgacgagtttgctaaagatgttgatgattcagtagaatcacttgatgaattaaaagataagatcaagaaagacttgaagaagcacaaggaagatgacgcaaaagacgctatccaagatgctgcaatcaagggtgcagttgaaaatgcaaccattgatgaagttcctcaagcaatgatcgacgaagatgttcaaaatcaattgaaccaatacttaggcaacatgcaacgtcaaggtattgacccacaaacttacttcaagttaaccggtactactgaagctcaattgcgtgaacaattagctaagggtgctgcagaacgtgttaagactaaccttgttttggaagcaatcgttgctaaagaaaaacttgacgcaactgctgatgaaattaagcaagaaatcaaagacttagcacacgactacaacatggacgaaaaagttgttcgtcgtagcttgagtgatgatatgcttaagcatgatattgctattagaaaagctattgatttagtagctgacaaggcaaagcaagttgctaagaaagctactaagaaatcaactgctaagaagtcaaccaaagaagacgacaaaaaggctgataaataatagttgataactagtttaagaaaagggcggctatgacagtcgcttttttctttactattaattaataagacaattttctttactctgttaaagtgaactgctaagcttattttgacataaagtaagtgaaaaggaggatggctgatggctaacgaaattactgagcaagaagaagtaaaatgttctttttgcggtaaaccacagtcacaagttaaaaaaattgtggctggaaatggagtctacatttgtaatgaatgtatcgatctttccaagaaaattattgatgatgaattaaaagcagattccattaaagaaactaaagatttacctaagccaatggaaattaaaaagcaattggatgagtacgtaattggtcaagatcgtgctaagaaggtgctttccgttgctgtttacaaccactacaaacgtatcagtcaaatggatattgatagcactggaactgagttgcaaaaatcaaacattgctttgattggaccaactggttctggtaaaacttatttagcccaaactttggctaagattttgaatgttccatttgctattgcggacgctactactttgaccgaagccggctatgttggtgaagatgtagaaaatattttgctcaaattgttgcaaaatgccgactatgatatagagcgtgcccaacgcggaatcatctacattgacgaaattgataagatttctaaaaaagcggaaaatgtttcaattactcgtgatgtttccggtgaaggtgtacaacagtccttacttaagatcttagaaggaactattgcttctgttcctcctcaaggcggacgtaaacacccgcaacaacaaatgattaagattgatactactaatatcttattcattgtcggtggtgcttttgatggtattgaaaatatcgttaaaaaccgtcttggtaagaaaacaattggttttggcgcagaaaatggtcttaaccaagtagatgcagatgactggcaaaagaatcttacaactggagatttagttaaattcggtttaattcctgaatttattggacgtattccaattattgctactcttgataagttgagtactgaggacttaattagaattttaactgaaccaaagaatgctttagtaaaacaatacaagaaattattgtcacttgacgatgtggaccttgaatttactgatggagccctacaagctattgcagatatggctattagtcgtcgtatgggtgcacgtggtttacgttctattgttgaaaattcattaatggatgtaatgtaccgcacaccaagtgatgataacatcaaagaagttcaaattactaaggatgttattactaagcatgcagagcctaagattacatataaagaggataaagctgaaaagacgagtgaggcgactaaataatgaaagtcgtagatgctgaatttgtcattagtgctgtttctgaaaaacagtatccgaaagatgatttaccagaatttgccttggctggccgttccaatgttggtaaatctagtttgattaatacgattgttaatcgccgtaaactagcccgtacatcccaacaaccaggtaagactcaaactcttaatttttataaggttaataatgagttgtatttggttgatgtaccaggttatggctatgcaaaagtttctaaaaagcaaagagctgcttttggggaaatgattcaagattatcttgaaacgcgtgctgatttaaagggattaattcttttagttgatgcacgtcacaatccaactgctgatgatatcaatatgtttaattatgctctctatctcgatattccaatcttggtggtagcaacgaagatggataagttgaaaaagatggaagcaagtcagattaagcaaaaaatcggcaagagtttggatctatcacaagaaaatgtatcttttttaccattctctagtgtttctaaattaaatgtagataaattctgggattgggtcgaagataagatgtaatttaaaaaaattgcataatttactgattaaattcatctatctttgatataattagatacgttgaaaatattgaactaataatgtttcaacaacctttgaaaaagaagaataccggttggagctgacaagctctagtcggtattttttcttgcctaaataaatgtattagctttagaattaaaatatacactttaaagaaataagggaaagaaatgactaaaaaaatcttatttatttgtcatggtaatatttgtcgttcacctatggctgaatttattactaaaaagattgttaaagatctaggtaaagaaaatgaatatgaaattgcgtctgctgctacaaccgaagatgcaattattagtgggatcggccatgatatcgatgtgcgttctcaaagagtaatgaatgagcatggaattccttttaaccatcgtcaggctagaaaaatggttaagagcgactatgagaaatatgactacattatagggatggatgaagaaaacttctttgatatgaatcatatttcagcaggagatccagaaagaaaagaatataaacttttatcttttgctggctctatgatggatgttgatgatccttggtacactggtgactttgaagcagcatatcaagatatttatcgaggctgtgaagctcttattaagaaaatcgagatgtctgataagtaatgcaagttttaccaatcttcctggttattttagcgatagtcgtatcaggatatatttttacttctaaacatcgtttttattttctgagagcgattattctgtttttagtattgttactgctaagtacaattaatttctcaatcttctttggatttgcggctctctttattgatcgaattcatgatatggaactagggaatctcttcttgctcctagcagccttggtaattttatcaggtcttctactatatgaaggcttaaagagatttaataaatatcatccaatttcagaaataactctaactttaattgaatattgtattcaatgggcattgatttatgttacagtttatcaatcgatcttcaataacattgctaagatccatacaattactaaaatgataaaaacagttcgtatcctcaatccggatttactagtagtaatcattttgccatcgtttatttcaatttggattgcggttgttttattgaagaaatatcaacacgatttataaaagatagtcttatggtaagactatctttttattatattaagactaaatttttgtcattatgcctttaagctcatacaataaaaagtgaaagcggattatatatgaaagaaggctttaattatgacagttccaacatttgatcgtgaaaaagaagctattatgaaagacgttcgtgaaatgattcaccgtaatcgtgacaatggctttattttagaagaattacaaaataaatacggtaaagacttttctgatgatgatttgaaggctttgattaaagaagctactaaataaccggaaagtaggcatactatgagaatgagtttttggatggattatgcatctccattttgttatattgcttttcataagctaactgaggcagttaaggcagtaagaattgatcaaaacaagttagattataactttcgcgcttttcaaattgatccaactgctactgaaaatccaacgcaaacgcggggagagaagttgatgcaaaaagatggtttaacccaaaagcaacttcatgagagatttcaaaatattactgaacaagctagagatgctggtttaacaattaattatgcaaatacacttccagtcaatacgatgaaggcattgcgtttaactaaatgggctaatgatacacaaagtaatcaaaagacagcccagttaattgacgcaatctttaaagcttattttgttgaaaatcaaaatattgctgataatgacgtcttagtaaaattagcaaaagacgctggattggatgactcatctgccaaaaagattcttacaagtgaagaatataaggacgtagttatcgaagatgaaaatgacttagccaatcgaaatgcggatgcagtaccatactttgaaattggccattatcatgatgaaggtgtgcctactaaagaagctctaattgaagcaatcaacaatttaatatatcagaaggcaaactagcctctattactaaatttcttctattcaaagtgtaatttcgcctaaaaagtgaaattacaccttttttattcaagattaaaaaggttctaaagttgaaatttaatggtaggataagaatggaagaaaaggagaatattatatgaagaaaatattattaatgagtgtgattgctctcagcttagtaggagcaagcggctgttcaaataactctaattcaactaataatagtagcgctaagagttcaaagactactcaaaaaaagcactgggataagaaaaaagatcaaaaactagctaaggaaatggataagtacggtaaaaagaagagccaaacctataccaaatatgatggtaaaaacaagctttctacttcagcaaatcgtgtttatccagatgcatttaagaaagatacttttaagttaaatggtaaaaagataagcattggctggagtccacaaggcgaacatcattatgattatgacgtcttggctatctataatcatgacttaactaaagatggacaacataagacttttctcttttgctggcacaagcaaaaaccaattgttttggtagatgagtctggtaagggaaatgttgttaacttacatgtcagtcaagacaagtcattaaatggtagcttttcaaacattatgtatggtgaaaatatctaacttaaggtctgcttctttgcagactttttgtttctaaaaataaatatccgtataatagatgaaaagtgagatgattggaataggtagggtataaaaatgttaagtaataaaatgaaagaactgcttgataaggtgtatgaaacaccaaatacaatggacctggcagtggtagtacagacaccggactttgaagaaacttttattagtgataatttacgccgctcttatcaaccagcgcgagctgaggggcttgtttttaggttaattgggactttcgttcaaagacttgatctagattattatgagttcattgatgtattaaagggcgatttagaaagtgacctatttaatgtccatgcgatgagaaagctcaagcgccctagtcaagagattactgatgataagcttaagcaactagaaacccgagtagaagatatcattgatttagctgaagaactagctagtgaaaaagagattggtgactatgtcttggtcgttaattatactgaccagttaggggatgttttcttccatgatactagcgatcaaaatatgtcgacttatcatgatattcaagtgatgctcatggaatatgcaaaccgcaatattcttaatcctttagctctaataaaagatttagaaaacaagcgtcctaatgaagctaaattactcaataaagctgcttttgaagatcgaaatattgatggcttcaatatagaagacttttggcaaatatatcgagctccttatcagggtggccaatttgatttagaaaatcctgaaggttatcgctttgaaaaagaactaattaaatatagtagaaacttgcaaaatttagatttgacatattttcttttacttgtgagaacagatcgctatgtttatgtattaaccccatcctttaagacagaagatgatctagtagaagccttagctggatatttaactagtctagaagtgaatatggactttacggatgaaaagtttaaagagatcagcgacatgatgctcgagagaaagtcttatcttgatttagctcatggaaaggattctgcgtatgcgattgacttaccagttaaacgagaagtggctgatgatcaagaaattcgaaaagaaattaatgacattttcagtgagctagtaacttatcaaaatatggatacagtccgtgacttttacatgtttgcaaatattaaagataataatttcactggtgggatgatgaaagacaataatttaacgagttacttactaaacttcgtcgaattattagcttatctaactcatatgtatccaaatctagcaccaaagaaaatagttgacttagttgcaactaaagaaaacctaaaacgtaagcgaaaatagttgctttatgcgagtaaagtttctattgtagaggtgagagtgtaataagagaaagaagagttgaaaaatgaaaatttcaatttggggcgattatgcatgtccttactgctacattggtgaaactaacttacaaaaggcaattgaagagttaggtgttcaagataagattgaatatgacttgaatgcttttcaaattgatttagatgcacctaagtcaactaagcaaactaatgcagtccttctagcttatgaaaaggctattccgttagctaaagcaaacgcagcctatgatcatgctaaggcaatgggtaaggcagttggtttaacaattaatgaagcaactgcttataatacaaataccatggatgctcaccggatggttcaatgggctaaggcaacttatcacgattctaagctaattgaaaatctagctgatgatttattctatgcttactttactgaaaataaggaattagcagaccataaagtattattagacgttgcaaagaagaataagctagataccgcagaagttaagaagatattagattcaaatgcatatcaagatgtagttatgcaagaagaagctgacttagaaagtcgcggagttgaatctgtaccatactttttaattaatggtcagcaatttgatggtgttcaagatgtttcaaccttcaaaactgtcattggagcaggctttgggatgaagccagatgaatttttaaacttctaaaaaagttatttaattaggtcctacacttttataggtgtaggaccttttttatatagtgattttttggtattattatattattgaataaaaaacgttatttaatagaaaaaggagatgacaatgaataataaactaaatctttttaacattggtttaccaactagtgaagacttaaatacttggtctaaagactgcattaagcaaaggttagatcacaatatcagtggcaatcttattccctttgtgtcagaagcaccagattatgaactaaatgagaatatggtagccttgtatgacttccatactaatccaatcaagaataaataccagtcggtaatttttgataaaaaagctggtattattttatgccaaaaaaatagccgccagctgattaaccatcttttaaagcacaagctgattttaggagcagttttacaaaagaaactacaaaaagaactgggcttttactaccgtcatacaatttctttaggagaaattgcctacttttcacttcgagcccattcagaaaagcatacttcttggattggcttgcatcatatgcagacggtacaacaagaaaatggtcgcgttactttttcctatcaagagaatggttatagttataactttgagtttgaagactgtgcgccgaatatgtataagcgattgggagaagcaattacccataatcatgttttaggacaaatgctagtaggctacgctaagtcgcatggttttcatctgaacttatgtaagtgcagaaagaatagtctagtagctaaccaagaatatttttacttaactaagattcaaaatgccttaaatttaactgaacttgctgaagaagcaattgaagaatttcatcgtaattatggtcgacactgtgctgacttctttgatatcaaagattggcagataaatgaccataatttgatttatcgattatctagacgaataaaatcaatcctgtagcacgcttgaaaaagcgtgctttttctttacaagaaatatggtgtgttagaggagaagatacaggaaagaaagaagtgaatgaaagatgaaaagttagaatttacaaggattgtggctagatagttcttggattttagaaaaattctgttcttgataatctaatacctgcacaagcgcttgtgacattacttaaaggaatggtcacatgattaaagaagagagttttattaaagcatgggaaaatcggcggctagtttgcggagcaattaaggctgctggtgtgaggaaagactatcaagagtatgcagatttggttcaggatggtgttttaatttatgcggggatgcttgagaagagtcaggaccacgatattgatcggcttgcctttaagaagattctttggcatacgttagatgaattaagaaaggttcaacgccgcgaagagagaagcgaagagataaataacgagcttgaatttaagaaggaaaaaattgaatgggataacttaataattttgaaagataaagtccaggaattaaatggaattgaaaaactagtgttttttgaacatttgctcgcacaaaaagagattacaaatttggttgaagtggcgggatgttcaaggcgaactttgcagagagtgaagaagaatttactgcttaaattgaaaaacgctttaaaaaattaaataaaaaacgtagcaaattaaataacgaaaaccgtatttttgctgaagttaggttgatttttagggggggtgccagtatacttatcaacgtgaaggtggttagagcgctatttagagcatgttctgattcaataaatgtgtttttttatgctaattgtgaattttctatgaattttcatatattttttgtataatgatttttagtgttactaaaaagtaaaaaataaaagaggaataaaatggatcataagaacagtgataatgaattaagacatcgctcacatcatcaccgtcatcatcgacgtaaaaagttttggcgtatcttttggattgtattaggtgtcttcctagcagtagacatcattgcggttattatcgcttggcacaatatccatgttgccactaacaacatgtataatccgatgagtaatgagattagtgatcggaaggttagcgacacactgaaagataagaagccaatgagcctgcttttattgggaacagatacaggtgaatttggacgttcttacaaggggagaacagataccattatgatgatggtcatcaatcctaagaccaataagacaacagttgtcagcttacctcgagatatgaaagttaacttaccggattatccagactattcaccagctaagattaatgcagcctatacttatggtggtgtagatgaaactgttaaaacgatcaagaagtacttcaatgttccaactgatgcttacgtcatggtaaacatgggagggcttgagaaggcaattgatcaagttggaggagtgacagttaagtcgccattaacatttgattatgaaggctatcacttcactaagggcgtaacttatcacatgaatgggaagaaggctttggcattcagtagaatgcggtatgatgacccacgaggagattatgggcgtcaagagagacaaagacttgtaattatggcattattaaagagttccatttcttacaagacagtcgttaaccaaacattcttgaattcaatctctaagcagacaatgactaacttaacgtttgataatatggttgcgttagctcagaactatcgtcatgcaactgataatgtcaccactgatcatgctcaaggacaaggcgattgggagaatggcgttgcctatgagtcagttagtcaagcagaatgtcaaagaattagtaataagttacgtgctgccttagggcttaagccggaaaccttaaagacaggagaataggaaaaagtggaaaacagtacaaaaactgaaaatacaatcgatttacgtagattatggatgcttcttcgagcacatatttgggccattattgcttgggccgttggtttaggagcagtgggatttgtcttagctgcttttgtagttgagccaaagtatacttcaactactcaaattttagttaatcaaaaaagaaatacgactgatgctggccaagcattcaatgctcaacaagctgatgtccagttaattaatacttataaggatattgttactagtccagttattttaaaagatgcttctaagtggctaaaaaatcctactgaagtagtaaaagcagctaaaccagctaaatatcgcactttagcagatgggactaaaaagttagtaagcccagctgaaccagcagttgttagaagagcgggacgtagttataatgtgagcgctaaggaaatgcaaaaagcagtttccgtaactacgcaacaacaatctcaagttttcacgattagtgctaagagtaatgatccagaaaaagctcaagcaatcgcaaatgcagttgctcaaacatttaggagcaaaatcaagagcattatgaatgttaataatgtgacaattgtatcacctgcttctcgtggtgctaaaactttccctaagacttcactatttacatttgccggtattattcttggattaattatcagtgtagctttaattgtcttacgtgattcatttaatactacagttagagatgatgattacttgactaaagaattgggtttaactaacttaggtcatgtatctcacttccacttatctaataagtttagtattaataataatgaagataattctggtaaaaagaagcgagtataggagagtataaatgggattgtttaatagacgtaaaaaacgcggtactgatgaaaccatgcaatatggtgctaagttaattactgtagcaaaaccacaaaatccagtaagtgaacagtttagaacagttaagactaatattgattttacaagtgttgatcatcaaataaaagctttagcatttacatcagctaacattagtgaaggaaagtcaacggtaacagttaatgtggctgttacaatggctcaagctggaaaaaaagtattattgattgatgctgatttgcatagaccaacattgcaccaaacatttgatataccaaatcgagtgggattaacaacaattttgacctcacactctaatgaagtagatatggctaacattgttaaggaaaatattattcctaacctttcagtaatgccggctggtccaattccacctaatccagctcaattattaggttcgaacagaatgcgtgcgtttctaaatatggttaaagagcactatgatctagtaattttagatttagctccggttttagaggtttcagatacccaaattttagctggtgaaatggatggagtagttttagttgtacgtcaaggagttactcaaaaagctggtgttgaacgagcaattgaaatgcttaacttaactaaaacacatcttttaggttatgtaatgaatgatgtgagaactggtccagatggctatggctatggttatggctacggttatggttatagtaaagaaaaagatacagaagcgaagtgataaataatggtattagttgatattcactcacatatattgccaggaattgatgatggttctcctgatttagaatcatcattagggttagcggaggctgcagttgcggatggaattacgcatgcactaatgactccgcatactttaaacggaaaatatctgaatcataaaaaggatattattaaggcaacgactacgtttcaatctgaattaaagaaacataatattccgttaacagtctttccgagtcaagaagttcgtctaaatggtaatttacctcaagctttagacgatgatgatatcttattttgtgatgatgatggtagatatatgttactggaatttccaagtgaagatgtaccaacttatgctaaagatatgacttttaaattattgggtcggggaataactccaataattgttcatccggaaagaaattctggtatcttggctcatccagaaagattgcaagaatttatcgaacaaggctgtttaacgcaaataactgctagttcgtatgtgggagtatttggtaaagagatcgaaaaattagctgatcgatttgtagaagctggtcaagtagctacttttgcttcagatgcccatacattgtcaaaacgagaaagtcgaatgcatgacgcttatgaaaagttagaaaagacgcaaggattggatgttgctaatagctttaagcagaatgcaagaaacattatcaattctgataatgttaatttaaatcggaaacctttaaagaaaaagaagcgtttctggatattttaattttattattgggggatagagttttaaatgatggcacaagacgttaaaaaagtagaactagatccgtcaaaagttaatggacgtgtaggataccgtgctgtaaaacgtgggtttgatattttagctagtggattggctctgatattattgtctccattatttttggttttaattgtcttaattaaaaaggaagatggtggaccagctttttattcgcaagagcgaattggtaaaaatgagaaaccatttaaaatgtggaagtttcgttcaatgattgttaatgccgataaaatggtagaacagttagaagaacaaaacgaaattgacggggctatgttcaagattaagaatgaccctcgcgtaactaaagtgggccatgtaattagaaaatatagtcttgatgaactaccacagttatggaatgtgttaaaaggtgatatgtccttagtgggacctcgtccacctctaccaatgggagtagaagattatacaccatacgacaggttacgattgactgttacaccaggttgtactggtctttggcaagtaacgaagcgtaatgatgcagactttgatgaaatggttgaattagaccttgaatacatcaataatagtagtttatggtttgattttaaaattttgttaaagactgtcggtgttgttattcatccaaatagtgcttattaatggagttagaatgaagataaaaattttaattgctgctcataaaaaatttccaatgccagctgttcctggatacttaccagtattagtgggcgccaagaaaaattataaaccagatattccttatcaaagagatgatgaaggagataatatatctgaaaaaaatcctaattataacgagttaacagctatttattgggcttggaaaaatttaaaagatgtcgatgctgtaggcttagttcactatcgacgtctttttttcgataaaaaaccatataatttagagaacgttataaatattgaagaagtagaacaactcttacaaaaatatgatgtacttttacctaaaaagagaaattactatattgaaacaaactattctcattatattcatgcacatcataaagaacctttagataaaacacgcgaaataattgaaaagtcatatccagcatatttaacagcttttgataaagtgatgaaaagccgaaaagcacacatgtttaatatgtttattatgaaagctgatgcatttgattcatactgcaattttatgtttggggttctagagaagcttgaaaatgaaattgatatttcagattattctgttcaagaagcgagggtatttggatatatttcagagcttttaatggatgtttggttatataccactaatgaaagctataaagaaattccatggggacaaattggccctaaacaattagtgaaaaaggctattagttttgtcaatagaaaatttggaattggcaaaaaacaaactcatttttagcatgatttatacagtaggtggaaagtttgaaaaagattcttcaaattggaatgacgtctaactatggtggaattgaatcttttattatgaatgtatatagaaatattgatcgtaataaatttcaatttgattttgtaaacatggaaactggtggaaaagatctggcttattcggacgaaataaaaagtctaggtggaaagatttataacataccaggaagacgagaaaatttaaaagcaaatagaaatcaactaaagaagataatcgaagaaaataattatgactttgttcataataacgttttaacttggagttattccgatggtattacattgccattaaagtattctaactctaaagtaattgtgcattctcataattcatatatgaatccaggaatgtatgcacgcagagttttaaacttttttaatagaagacttaattatagaaatgatataatccgcctttcttgtagtgaaggtgctactagatggctatttagaaatcgttctgcagtagtaattcctaatgggattgagacgaaagactatagttttaatcctataattagagatgaatatagaagaaagttcaatgtagagaataaaaacgtttttttgcatgtaggaagattatctcatcaaaagaatcatgactttttatttagatggttcaaagaaattctaaaaaaagattcgaattcaattttatttttggtgggagatggtgaattaagagaaaagctacagcaaaaagcaaaagaattagatatttcatcacatgttaaattcttaggaataagaaatgacgttaaaaacttaatgtttatgagtgatgcatttctatttccatcgcattatgaggggttgggaattgttctcattgaagctcaagcaacgggtttacaatgtatcgcaagtaataatatcgagccagaggcaaaagtaactagtcaaattaaaaccattgatattactgcttcacctgagaaatatgttgatttagcgttaaaaagtgttgaagaatcacgtgaatctaaccgtataaagtcatataaggaagttcaaaaagctggctatgacattagtaatactgtagaaatattagaggggatttattcaaagtgaccgcgaagaagctattaattgttggggactttattagtggaagtggtttgactcagtttatattcaatatgtttcctcattttgatgttaataaatataatattcaatgtgtaggatatggaattgattcaaaacaagaaacaaataaaacatgtgatgacttagggtggcgattagaaagggtagtacctataacaaaacggccattggcacatgtgaaatggtggaaagactttctaaaaaataatgattttgacattatatattttaactattcgtcttcttggaattattttcctgtaaaatatgcaaaacgctatacaaatgcacaaatagtttgtcattcgcataatgcatattatagtcatgtttttaaaaataaaattttaatgtatttcctgaatgtaatgaataatagaggaaaaaaaattcttaataatatggccgatgtgaaattagctactcctaaagattctgcattatggatgtttaatacactaaaagacgtaactgttatagataatggaattgaattagataattttaaatttgatgcgaaagcacgtaaagaacttagagctgaattaaatatatctttaaatgaaagattaattggatttgccggtgttttacaagaaagaaagaatcctatttttgctttacaagttttttcagaatatcttaagagcaatcctaatagtacattcttaatgatcggtaatggcccgatgaagaatgaaattgtgagaatagccgatgaattaggaattaagaaaaaagttaaatttataacttacactaataaattaaataaatggtattcggccatggacatacttttatttccaagtttatatgaaggatttggtcttgttccattagaggcacaggtaagttctttgcctatccttgcttctagtaatgtagcaccacaagtgtttgtaacacaaaatattaaacgaattactgggtatgacaaagataattgggttaagaagttaaatactataaagtttaaaacaaatgaggaaagatcatcacttgattcgtctttaaataaatttgatgtgaagaaacaagcaaatcaaatatctagtttgctagaaagtgaaaagtgataattaatgaaagttatgcattttaccgctggttttgttaacggtggagtagagcaagttttattaaattatactggtaagttaaataaagattatgatgtaaaggaatcaatagtttatctacatactgcagattcagcaaaaaagaaaatgtcggaacaattggggaataaaatgtatcaaattccggctcgaagagaaagtctgtggggaaatataaaatcaacttaccaactgataaaaaaagaaaaacctgacgttgtacatagtcatatgagcctaatgaatttctttccactaactattgcaaaaattttgggtgttccagttcgtgtgtcccattctcatttagccctaaatgatagtgattctgttaaagataggatttataagaaattaactagttggtcagccaacgaattagtagcgtgtggtgaagaggctggaaaatatctctacggaaatcaaaaatttaatatcttgtttaatgcaattgatcagagtaaatatcaatttaatcaatctgcaagagaagaaataagaaaaaagtatcatattccagaaaaatcatttttaattggaaatattggacgagtggttgaacaaaaaaatcaaaaatttcttgttgaaatatttgataaattttatggtgagtatcccgatagttacttaatgattattggaaagggcgagaagactcagcctgatgaacaagaattagaaaagtacattaaatcaaagaaaagcgcagatcatatcattagagtacgtggtgtaaaaagtactgaaaagttttattctgcatttgatgtatttgctatgccttctctttatgaaggcttgccagtagtagcaatagaagctcaagcatctggtataccaacaatactatctaaaaacatagatccttcagttatatattctgataaagtaaaactactctcaatagatgagggagtaaatccgtggattaatgaatttcaatcttggaaaaaacaggattttgatcgtagttttagaggaaacgataattataatattaatgttcaaaataaaaaactatatgactggtattattcatggataaacaaatataagtaaagatgagtaggagtaatatgaaaaataaaaaaagcgttgattgtgtagttgtaaccttcaatagattagatttattaaaggaatgtgttgaagccattgagagtcaaacctatccaatagaacatttttttattatagataattgttctactgataatacttgggaatatttacaatctattaaaagtgaaaaaatagttcctatacatctagaaaaaaatctaggaggagctggtggttttaacgccggtttaaaaacttttattaataaaagtaacgcagactatgtttggattatggatgatgataccatcccaacctcaactgctttagaaaaattaattgataaatcaaatatttcttctcatcttggatttttatgtagtaatgtacgttggcaagacaatagtgtagctgtcatgaatattccaagtccagataaagaatggaataaatatagtgatcaaggtgtaacgaaagttaagtcagcatcttttgtatccattatgtttcctagaaatgtagtaaaaaaggtaggatacccaattactgatttctttatttggggcgatgatgttgaatatactcttagaattacgcatgattatcatttagatggatttatggttaatgactctttagtagagcataaaataaagcaaaatattgctacggatttggttaaagaagagagcttgggtcgtgtaaaacgttactatttggcacagcgtaatacaattttttatcttaagaaacatagtacaaaaaaagaagtatttaaagcaaccatacgtcaaggagtaaaggtaccaattaaagctttaatcaagtctaaagaccatagattttatagagcttgggtatcagtaaaaggtacagcagcgggattattttttaatccaaaaatagaaaaggtagaaaaacgagataactttaaataaataggtttagtttaaagaggcttgtgacttaataaattctaatagaggaaaatagtttataacctatgaaaaaaaatgtatatagtgggatctgcgcctatttacttgcgatgattataataataaattgtcgttctgtttggcttagtaatccaaactggttaaatttaaataatataacttatattttatttatacttggatcaattaccttaattggaataaatataaatagcattaatgatttaaataaaacaattttaagtagtgtatttatttttctatacttttttgtttattttatttttagaccaataggattaactcaaaatataaagttattaattatagtaatgatattaatatgggtaatgcaggttaaaggaaaaaatcttccgttaattcttgaagcatatgctaatcttatggtttttattgctgtgttatcggtaattatgtggattttatgttctttgattaaagttattcctccgactggcactatcccgtttaattggacagctgttaatggagtgcatagttttattccaacatatggtcacatatattttgaaacgcaagatataaatcttccttttattggtaatataataagaaatacagcagtatttacagaagctccaatggcatcattgaatttttgtattgcttttctcttaaagctaaatgagaatagctataagaaagatagcggaatatctaaatcacaaatttggttaattatagctattttatctacattttcaacaactggttatattttattaattttaattttctttataaaatggcttgaagcagataaaaaatatttcatttataaacttatatttgtaattcccgtattaattgttgcaatattgggaattaatttacttattggacaaagaaccgtttatggtactatgtcaacaaatttaagatttgatgattatcgtgtaggaataattacctttttccaaaatccttttttaggtgccggtctaggaaatagtgatgcgctagtacaaaatatgggaaattggcgtatatatatgactggatttagcaactctatcactgaagttttagcccaaggaggtatatacgtcagtttgatatatgcatatagctttataaaaggaatttactatagttttaaatataaagcgttgaatggatttatattagtatttggaactctatatctgttttgtacaacgatattcagctatcagtatatattaatagcattattaattttgtttatagactttaagatatattttaatcatagataaataatatatagtaaggagaaaagaatgaagaaaaattatttagttgtaggatcaggcttatttggtgcagtatttgctcatgaagcagcaaaacgtggtaataaagtcactgtaattgaacaacgggatcacttggcaggaaacatttatactaaagaagttgatgggattcaagttcatcaatatggagcacatatttttcatacctcaaataaagaagtttgggattatgtacaacaatttgctgaatttaatcgatacacaaatgcgcccgtagctaattattatggtaaaatgtacaatttgccatttaatatgaatacttttagtgaaatgtggggagtaaggactccgcaagaagctcttgaaaaaattaatgaacaacgtcaagaaatggcaggaaaagagccacaaaatcttgaagaacaagctatctcgttgattggacgtgatatctatgaaaagttaattaaaggctacactgaaaaacaatggggcagaaaagcaactgaattaccagcattcattattaaacgcttaccagttcgattaacttatgataataactacttcaacgatgattatcaaggaattcctaaaggtggatacactcaaattgttgaaaaaatgcttgataatgaagatattgaagttaagttaaatactgatttctttgataataaagatgaatatttaaaaaactttgataagattgtttacacgggaatgattgataagttttttgattataagttaggcgagctagaataccgttcacttcattttgaaactgaagaaaaagatgttgataattaccaaggtaatgcagtaattaattatactgatgcagaaactccatatactcgtgtaattgaacataaacattttgaatttggtaaaggcgataaaaataaaacaattatcacacgtgaatatccagctgattggaaacgtggagatgaaccatattatccagttaacaatgaaagaaataacgaattatacaagcaatacagagaattagctgaaaaagaaaacgataaagttatttttggtggtcgcttaggtcaatacaagtattacaatatggatcaagtaatttcagctgctttagagtctgtaaaaggtgaatttgaaaaataaaatgggaaaacatgcgtatctaataattgctaatcgaaatcctaatcagttagctactttaatagcaaccttagatgattctagaaatgatatttttattttattagataagaaatctacaagtatctttccagcagtttataaagcaacctatgctactgtaacgatggttgatccaataaatatattttggggagattattctcaaattgaagcagagctagcactttttaaagctgcaaacaatggccattatgattattatcatttactttccggtcttgatttaccattagctaatcaagatcaaatacatgatttttttgataaaaatctaaataaagagtttattacatacagtggagctttaaatccaaaagagttatcagtgagacttcataattatcattttcctaatacttttagaaccgataacaaatttaaaggtctttatcatagaatagaaacaaaactatattctaaaatgccacaacgaagaattaatattgataaaattagttttggctcaaattgggtatcactggataatgagcttgtctcagacttagtagataatgaagatttaatttatcacttattccataatggatttttagtggatgaattatttattccaatatttattaatctatttccaaaatataaaaaacgagtatatgactcaactaaagttagtgataaaccagatgagtttcaaggaaatttacgttatataaactggtgggatggtagtccctatacttggcgattgaaagactatggtatgcttcaacaagctaagaaaaaagggcatcttttttctcgcaaatttgatgaaaatattgatagcgatattataaaaaaggtagtaaacaataatttaagcagttaatatgaaggttataaaaaattatctatataatgtaggatatcaagttcttgcaattattgttccactaataacttctgcttatgtaagtagagtcttacgaccagaaggcgtaggggcaaattcatttacaaattccattattcagtactttattttaatcgcaaatatgggaattggtttttatggaaatcgacaaatagcttatgtacgtgaaaatagagctcaaatgtcacaaaccttttgggaaattcaaattgtaaaaacaataatgactctatatgcattcgtagcatttgaagtatttatgattttttatactcgtcaacctgagtatatgtgggcacaatctattaacttaattgcggtggccttagatatttcatggttttatgaaggtatagaagattttaaggttactgtgttaaaaaactcctttgtaaaaataatttcgatgattgctatttttatttttattaaggggcctgatgatgtaactctctatatcattgtcttggcgctatctactttgctaggtaacttgacattgtggcctaatattcgacgtgacttaagtagaacagattggaaaatattaaacccatggcaacattttttaccaatgttggaactatttattccccaaattgcaactcaagtctatgttcaactcaataaaacaatgctcggagttatggtagatgaaacagcatcgggatattatcagtattccgataatttagtaaaattaattttggcacttgtaactgccacgggaactgtaatgttgcctcatgtggctaatgcagtttctcatgggaatatggaaaaagtgaataagatgctctataagtctttcaattttgtttctgctatttcataccctatgatgtttggattagctgctatttccttgacattagctccaaaatattatggtccaggatatggtccagttggaccagcaatgatgattgaatctattgtgattttaatcattgcatggagtaatgtaattggagttcaatatttgcttcctatccatagacaaaagcaatttacatggtctgtcaccttaggagcgattgtaaatctaatcttaaatgtacctcttattaaaatgtgggggctaaatggggctatgtggtcaacagtcatatcagaaatagctgtaacattctatcaaatgtgggctgttagagatcttctaaactttaaagagctatttttagactcttggaagtattgtgtagcagggatattaatgtttattccagtcttttggatgaatttacatttgcctcaatcatggttaatgttaggtattgaagtgcttattggaattttgatttatggagtagctatttggatattgagagcttcaatacttgacgaagctagaaggctaataaaggaaaagatacataaataagatgaaaaaaagacaatcaaattttgaactattacgtataatatgcatgtttttaatagttgctggtcatgttacatggcaaactaagttttcttatgatgaattaaatttggttcatcgagtatctattcaaagtttatggatgggtggagaactaggtgtatggggttttaccctaatttcagcttattttttaagtggatcacattttaaaataaaatccttgaaaaaaatctggggaattaccttattttattcaatatctatttacttattattagtgattttccatgttattccaatcactcctaaagatgcacttaaatcttttctaccagttttaacaggaaattattggtatgtttctgcttatattggtatgtatattttagtgccatatatgaatattgtaattgaacatttggataaaaaagaatatcaaaagcttcttttacttctatttattatgttttctttacttccttatttaaagaatattacagtagtaactaataataattctgtaattaatttagtttatatttattttgtaggaggatatctaagaaaatattcttctgattttacaaaagaaaatcaaaaatattatattttaatatttttaggatcactaattttaatgttgagctctatagttgtactagatttgattagacctaagtcatggtttgcatttttgactacatcaagtcctttagaaactatagctggtgtatcgctctttttgattgttaaaaacacctctatttcttataaccaaataataaataaaatcgctgcatctacgtttgctgtatatttaattcactgtcaagctatttttctaccaattttatgggataagattgttcatgcacagcaatggcaaacgattccatatacggcaggatatgaattgctagttgcatgtgttatttattgtacagcaacgctaattgattttactagactatatattttacacttatggtcaaaaataaaagttagatttggttaaaaataaagagatacgaacaatatgaaaagaattagagactcaaagtttgaattattacgtattgtttccatggtatttattgttatttcccattattcgttatggggaggaaggaaacctatagatatgaatatttaatttatcaacctttaggataaattggtgtttgtgtatttatttcaggttactttttatcgtcacgtgttttgagtgcaaaggatggctggcacagagcaaaaaattagggataaaaactttaatttattcatggctaatatttgtagttgttattagcataacaggattaaaaaatttatctattactaaaatcttaacagcaatttttccagttgtttttggtgaatattggtttattactggatgctatttattccactttttaatcgaatgcttacgtccttaaataaaaataaacttaaatattacattgaaataattgcatttatttctacggtcttaccattgtttgttaaaagtcttcgtccatttggagatatgaattcggcatcagttttaataacagtttatttaatagccggctacatgaaaaaatatgatataaaattaagtaaatttatatcatggggcatatttatataggtggacttatccttgaattaatctcaattatggtattaagaaatcatggtgataaaatgattcattttccttatggtatcatttcaatggtttctgcttttggattatttaatataggcatttcgatgaagagcttttataataagtttattaactatattgcatcatcggttttggcagcatatctcattacagaagatctatttataagaatatggttatggaatgacttccttcatgttcctaagttgcagaactataattatcttttctttcttttgtatggaatagttatttccacattgttagttagtgtatgtcggttaatagataaaatatatgaacaaattgaaaaaatgattgtaccaaattaagtatatggaaaactagttcctaaactactaaaaaatagatgagcttcgttatgaagagtatctctttttcaatacactttagtttttgacgcttattatctttatctgcatgaatttagaaaaaatgcccatcagtacttatgagtatactgatgggtattttattgcagaaaatagaaaacttgtaagcgtcaaaaactgaaggatatttaaaaagcggtctagttttgatacggggtgtatctgttaggccgctttcatttgcttctcttttgttttacatgattcatgaacttcttttgtccatggtaataagccgacattctttctttatctgtcagaatctcttcatttggtaatttatccaatagatattcaatatatttttctggatcaaggttatttctttgaatggtttcaattaaactcaaaatgataggtgaagtttgtgcaccttcaaagatttgtgagaataaccaattctttcgttcaagcagtaatgtcttgattgctcgttctgcctgattattagagaaaaccagcttgccatcaagcaagacattcttgaaggtcttttcatgatttagtgcataagcaattgctttaccaagtttgaatcctgatagaatcatcggttggttatttcggcactagtcgaagaattcttcaaatagcggctttagttctttttgacgtctttgatagcgttcttcattaggtaacatctcccatgaactctctaatgtaaacatcttatacaatagtgaataccttgtttagaccgagtagtaggcgctatccaactaatgttgcactagttaattgcttatagaattgtcacaaacaatatatacttggtctagatcataaagattactcatgataagaacttctctaagattttagctattattcagaatctaaagaactataaaatttaattctaaatctgtatttttaagacttagaagccttattgtttttggaaacttagttttatctgttaaaggtacaagatcgtatttatggtttagaaaatctgtcttctcaaaattgatatgacgagtatgtgatgaatacgaagcggacggtagatattttagtttttgacccttatgttataagtacgacttttacaatgttttatttaaaataaatactcacgaaagcagagatgctgcattcgtgagtaaatcgagaagatggaaagcttaatattgtaattttttcttctcgtgtatagtattgtatcatgtatggattctaaaattaagttttagaataaaaagaggctaggatgcaaattgtaattttaccgtatagccaatataatactttaaattaaacattctaagttaaatagggaatcgattattcatcaggacatcgattatttttcctttaggttgattttaattaagagatggctaaagacataagcaatacattcaattttacgataatctccttcaaggtgctcattagagtaagttgaggtaatctcgtttaggacaccagaataattacgtttaaaagttaatagagtttgatgcatttgtttatcaacggtttggtttgaataaagtagatgggtaacttccttttcctttttgtctttaatagcagtcataaagtcctgcataatccaatatgtattttcgagatctttattgcactctaagccgtctaagacaacatgttcctgagtgagatagtctttaaagtgccaatcgtagtagggagtagtcttattaagtttgtcatatttcatgagataaagcttccgaggagattttagaagcgtatattcgcgacttcttttattaaattgcttcctgatttgaactctaagtatattaaacgatctagtaagcatttgaacgatatgaaaacgatcaataactatctgagcatttggaaatagctaaaggataataacaattaagatccataggtactgttttaaccattggacgagccttagttaggggtgaacttgtgaaaatggcgtagaatatcaggtttgaaacgagttctaagaatttgaacaactttgtaagtatcactatctagacaaatagagtgaagctttttgcctacaccttggaattcatcaaaagctaaatgttcaggaagatatcaaatctattataaaatttggcagaacaggatgttaagactctttgaacagtattaactgataagttatgttctcttgcaatactcgtcatagaacggtgagcagaaaggactttaagtttttagagatatgacagtatttattaaccagattagattgagccatagatcttttaaacagtcattgcaaagaacatgttgttttcttaagctgatagtaacgggcttactagcatcaacagtaatgaaacgaacgttagaaacgtaatgaccgttatgcttaagattcgtagaactacaataaggacaagcagagtggataagctcagctaaatatattttgtaaattttaccgttaatattttcatttgaataatcagaaaaaataatattttgatattcaatatcaggaggaaatctaatataattatttaaagaggacatagtttgaatctccatacacttaattgaattggtcgaagaaggattttaagtaagagaagactatagcctctttttttatgtaaaaaaatcctgccgatagaatatcatagatattcatcaacaggaaaaattacggaactactgtatcaaagctagacggttttttcaacacatttcagtttttgacgcttataaactggatgctcaacctgaaattattaggaataaataaagtgaaacgatcagacttgatcgatccgctagagtactatttaacttgttagtgagttataaatgtaataccgtattcggtttgatacgtgttgtgtaataaaagggcaaactagaaaagtttcttcaactctatttatactgtctgctaaagtaggattatagcaaattttattttctccgcattttttctattgtatcattatgttactaagtatatgacttaaagttaaaattattaattattgctgtaatgttaaaaagcaaattgaaaggaataattaaatagtgaagaagttaaaaaatcttgttaatttagaaaatatttgtctaagctgtctgttagtttatataatagcttgttcaattcatccaaaatattttaaatatttaggtataagtatagaaatagtatcggttttattaatacttgttattagctatattgaaagaacaaaaaaagaaatagaaacctataagagtaaaatagaaaattatcgtattttaatagctagtctttttctttggcttgtaggttttttaattgtattaccccatcaatattctgttgatcttaaaaattggattggtattagttctattttaagcataggaactattttattcacttacaaccctaagataattgaaattattttagatggggattacgtaattgaagaaaaagatttagtaaaatattataaatgtgattcaaatttactgactgtttatgctattaatagatgcaacaaagatgtgaaactcttctataaaggaatatgtattgaggaagactggaaaaagttaaacagtggtgaaattactgaaaatcaagtttcgttttggaatgacactaaagaaatagataaggtaccgcaaaagaaagattacaaaacaattggtaaaaatgaggaaagtgagttttatagaatagatgtaaaaagattaagaacaacgtacttaaatgatttagtaagacaaaaaaattgggtaattgtatttaaagacattgggggaaactattggactaaaaagtttcaaatttaaattaaaaaatctagtaagcatttgcgccagcaattaatatattaggcttaaagtgactgttgagtatttttataactcaatgtagatcgttaccacctaagtaaatagagtgcattttttgtcaactcaattaaaattatcaaaagctgccggaatatgatcacagttatagtagaacttcaaaaagcagatactaagatatttaagatagtataagaaaaaatcatgttaaccataaaatagtcgtttttagtaggagaatgaatagcaattaaataaagatctctttactaacagcaatagagtgcctcgttgttatcatgattaaagcattctttgttttctaaatttcataataatatgttttttagtatgagaagaaatgaagtacaaactctcatgagaaatatagtacgagtgtagttagaactaatagcctgtagaaaggtaagcataggatattagtttagcttcctctctgaatctaaaactttggtacatgtactttatatacagactcattataatacaagataataaggattcagattttacttaatttgtcgaaagaagtatttatttaatttgttcttttatacttcgttatcttgcaataaatacatcttggaagattgtggtgatggacagaaaaatggaaaaatattttgatcaatataaaattttagataagtttttaattgttacaattaaaaactggataataaaaaacaaaagcttgatagtgagtacaaatttttggaatagaacatttgattttgttgtttctatatatttaggagtaattgccttatattttctaattattatgattgtaaaaatttatcaacgtacaagtcttgaaaataggcaattactagatgcatatacttatccaatattaggggtattaatcttttttagtatccttatagccacagtaaattatcgatggattttacctaaaggtagaaaatggatagatttcaaatttacgcttcctaggaaaaaacgatcagttcaattttttgttgtaattggactaatattaccttttattatgtgtgtggtggggtggccttatttattaagtgaaatatataaatacaattcaaacttttattgggaaatttcagaatatgatgtaccttcttttttctttccgctttttaccggaagtatcgcaatagtgacatattttaattcaaaacatcctaatttatctattattgtaaatagtcctacctcaatgcttcattctaattatgtaagtataagtgtaaaaaaaaagaatcgttttagagatatggtgtaataatactggaggaagagctggaacatttaaatttgttggcattgtatctagtgatactcttagaaagattaatagagaacatagagtcaataataaacctaacttattaggagattatcttcgtagagataacagttggcaaaaattagattctggagaaaaaggatctagtaatttggcaagtatagatgaaaataatttagatataataaatcaatttatttatgtactatatgtagattcagaacaagttccgtatttttatggaatatatctagatggtgattcatgatacaatttaattataaaaataaagttattaaaaataataactattgcaattcttaatagctgaaaaatttgaaaggtgataaaattttataaaataggttgtaaaaaaaggatttttttgtgtatgaactattttatagtctttaatgtaatatttataatgttaagctattcatgaatgatacaatgtataattaatggaacttcgatgtataattttcggataaatctatacatttaaaggtaaagaaggtgggagtaatggtaactgcaacatttaaagtcaataacaaaattttaaaatgggttttacagattgctgatgataaactaggtgttgattggattgataaaattaaagtgtggatgaaaggagaaaaaactcccactattcatcagttacaagttctcagtaaaaagtctcaaattccttttggaaacttctttttgtcagatcctcctatggaagagattccattacttaagtttcgaactattaataatgacgaagtaacaaaagttagtagtgaattgttaaaaatgattgattctatggagatgaggtcagattggcttgaagattatagaataagagagggatattctccaattttgtttgtaggaatgggaaagcataatagtcaacaatcttcggaagaaatcgccaaacaaattttgaaattttttaatctaaaagaagattggaatattcaacttaaatctaatcaaaatgcattcaattatcttagaactataattactagtcatgggatagtagtagagacgagcagttttgttggaaataatacaagagatggcttaaatattaatgaatttagagcatttgtattaattaaaagatatgctcctttaatttttatcaatacaaaagatagccaaaatgcgagattattttctttagttcatgaattagtacatctgtggtatggcaaaactgaattatttaattataattttcaaactgacccaaaatatctaaataaaaaatttgaacagcgggtaaataaaatagctgaatccattatatttaataaaaaatattttattagatactgggatagtattagaaactcagattttgaaaaaatttataaaatagctaaaaaattcaaagcaagtcctatggcaacggcaataacagctaaaaattataaattgatttctcaagaattagttaatgaaattaacaaagaaacttcacaatttatagttaagtcatctcataccggaggtcctaatttctatgacacgttggcgtataaattagatcataattttgcgtctgctgtgattaatagtacggatcagggagatacaacctatttagatgcatttaatttgttaaatgtgaagaatatgcacgcttacaatgaattaaaggctagagtggaggagaaaaataaatgaccaagtatctcttagatagtaattgttttattgagccaatgaagcgatattatggttttaaaatttttccctctttttgggagtggtttggaaaggaaataaataaaaccaatagtttattaattgtaccgaaatgtgtaagtaatgaaattaatgtagatccgaatttagctcaatggtcacagaaaaatttagtttcagtaatttatgatgaaaatcaagaccctttaatttgggccgaatatgggaaggttattaaatacattcaagattgcggtgcatataaatcaagtagtataaatgaatggaaaaaaataggtaaagctgatcctctgttaatagcaattgctattaaatataattatcaaatcgtaacatttgaaaagggaagtggtcaatttgcctatgataaaaataatagatggaattggaaaggaaatgtagggccgatgggccatgagcctaagattccagatattgcccgtcattttggtatcacttgtctctccctttttgaactagaaaaaaagttgaatttaactatttaatcttaattttcattcatataaatggctgtttgtcaaatcctgttgatgaatagtttataaagagagctaagcaattagaaaataattgtttggctctttttcttttataatattttcttcgagtctaattctaattaaaagaaaaattataatagctataaaaatttgttaactgaattgttgagtttacgggtcctaacagcagtaaagcaatcggtagaggtggaataattgttcgacttaatatttagaagagtataggaaaatattaggtaatgcttaattcttacgagtcttgttattatatacttatttaataaataattagatttttatctataatattagatagcacttcaattatgtacttagaaaaactatttaatatattagcgaaattttagatatggtttagatgatatttaaggagaaacatgggaaaagaaaaaagtatttttagagagttatttactgaattacaacaaacaaatattatgtacatatctttaatttccatatgtttgctgataataattgattacttgaatccaacaggaagagtaatggcagagttatggggaagtaccgtagtcattgggatattgatatcattttggttcgtaataaataataaaattctacttttatttaaagtaaatagcataaatgcattagatgatattaatctgtatattgttataagcgatctaggatatggattatatctcttaattaccaaacagtatttctcatggaagtttgtagtagtacttcttatcgctttgctttctttgtcgatagggatttatagaataatatgtttgcaacaagcgattttaaagagactaaaaaatgatgaagaatgccatttggtagaattaaaggacttatataaaaataatttaaatgtaagtttgccaatatttattaaagatagagcagtaaaagatgatttgttaggtcgagacagtataattacactcctatataaatcaatctgtcagaacttttcaaaacaagattctttcgttatcggattatcaggtccttggggttcaggaaaaactactattacaaatattgttcgtaaacagctagaagcgcaaaattcagatattaagattattaagggactcaatccatggatttctggctcagaggccgttttattaaattcattctatgatgcattgttaaatgctttagggattaattacagttcgcgaaaaatcagaaaacagttaaaagaagtttcaagatatgtgattgaaattccaactgtaggaaaatcattgagtaaggtaatggagaatgatattaatcaagaaaacatagagaaatggcaagctaatctaaaaaatttgattttaagtagtaataaaaagtatgtcctgtttattgatgacttggatagagcaacaagcacacaaattagatttcttctaaaaatgttaggatctttgtttgatttacctaatttgatatttatactgctttatgataggagtagattagaaaaaatattacaagacgataataaattaaatacttcttttgcagaaaaaataattaatctagaattacaggtacctaaaatatcagaaaatagtgtgcaaaaaatttatagaagctgtttgattaatttagctagaatatataatgtttcagataaagaagttaataatttagattccgcttttcaattgatcataaagagtattgataatcctagagaatttatacgttttttgaattcaatatgttatatagccttttctcctgatattaatttaaatagaaatgatttattattgattgagtatatatcgtttaaacaacctgatttatttcaattaattaaagaaaatccgaagttatttgtttcggagaatagtgagttagatatttctgatgtatttaatttaggaaaatttaaaattgaaatatatggtttttattctaaagttttaaaaaataaatattcaagatggttagcaattttagaagtattatttccttatatcgaacaatgccaaatgggaaaggaccatttgcagataaataataattctaatgaaggtagaaagaataatagaatctacgatggacataattttgatttatatttttcattaagtgaggactatgtattaggaaaaaataaaaaaataaaggatattgtagataaactaaaggaaaaatttgataataagcaagttgaaaaacttaaaaaagaaatatttgagggtagtaaaacaaatgtatctgaaaatattcatttgttttccatgtataaaaatgaatttaatagtgtgacaggggtagctctaagtagagtaatcttagacaatatggaaaaaattcctgagaatagtaaagcatttgtattatcagcacgtagtatagcagcttcgacatgtgttggtttattaggagatgcgccaaaagaaaaaatttctgaacttttagaaaaatatagtactaagtatgaattaattgatgtatttgatgatttatacacttttagtaaaagctttggaaaaatatatgaaatttcaggctcaatatggagaagaatgtgtgtagatattattaaaactcctattaatttatataatgatcagtattaccaaccaaaattaatcttgaaattatatagaggaatagaaggagataaaaataaaataatttcggactatcttagagctatagccactaaaaataatatatataagatattttatgattttatgaatgtttctcatagcaatgaaggaattggctatacatttaaagaagaaaatcatcatatattggaagaagtacaattagaaaatattttgcccgatccaataaatataagtcaaaaggtaatttttgatatctattcaaaagggtcgagtgacgctttcgactacaagtataaagatacagaaataaatattgagcaattataaaaacacgctatatgatataaaaagaaaataaaatttatgccaacttactacacaagtggcgaatttgcgaaaaaagcacacgtttcaattcgtacaattcgctattacgatcaaaaaaatttattaaaaccatcaacacacacggcaagtggtgcaagacgctacactgatgctgattttgcaaaattgcaacaaattcttctattaaagtatcttggattttctttaacagacattcgagaaatgactttaggatcaggagacaggcagcttttacttgattctctccagatccaaaaaagactagtagaagagcgtcttaaagaaatgcagaatgtagctactgccattgattcaactagtagcaccttgaaggcagggcaagaagtagactggaacaagatgttagacttgattcatttgacttcaatgaatcagtccttaagtactcaataccaaaatgcttctaatatttctgcgcgaatcaaacttcatcgagattattctcttaataaagagggatggttccattggttgtttagacaactagacttaaagccggggatgaagattctagaaataggtgcgggtaatggtactttatgggcacaaaatctagatagaattcctaaaggattaaccattgttttatctgatatttctgaaggtatcttatctgatgcgaagaatgagattggagacagagcagaatttcaatatgctgtttttgatgcacaaaaaataccttttgcggataatacgtttgatttagtaattgctaaccatatgcttttctactgtgacaatattcctaagaccttgaaggaaataaagagagtaatgaaaaagggcgcttcttttgcttgttctacttattctaagaggcatatgcatgaaattactgatttagttcaagaatttaatccagaaattgtcttgtcttcaactaacttgtatgatcgttttggcttagacaatggggcagaaattttatctcatgattttactgatgttaactgtcataagtatgaagatgcaattgaattgtctgaatctacgccagtaatttcttatattttgtcttgtcatggtaatcagaattcaattttactcgatcactataatgaatttaaaaattacgttgacgataaagtaagctatggtttccacattacaaaagatgcaggttactttatttgtaagaaatagcaacaaagatcaagcacattaagttaaatgcttgatctttttctatagaattaaaaattcttattttcttgaaggtgacgtaacgtaatgttatatgataagtaatgaataaagaaaggcagacctaattatgaaagttattgttactggtggtgccggttttatcggttcaaactttgttttttatatgttaaagaagcatcctgattacgaaattatctgtttagatagtttaacttatgcaggtaacttatctactttaaaggatgttatggataatcctaacttcaagttcgttaagttagacattcgtgaccgcgaaggtgtttacaagttattcgaagaagaaaagcctgatgtagtagttaactttgctgctgaaagtcacgttgatcgttctattgaaaatccagaaattttcttagaaactaatattattggtacttctgtcttaatggatgcttgccgtaaatacggtatcaagcgtttccaccaagtttcaactgacgaagtttacggtgatttaccattagatcgtccagatcttttcttccacgaagatactccacttcatacttcaagtccttactcatcaagtaaggctagcgcagacttgttagttggtgcatacggcagaactttcaacttgccagtaaccatctcacgttgttctaacaactatggtccatatcaattcccagaaaaattgattccattgatgattcaaagagcattaaacaatgaaaaattaccagtttacggtgatggtaagaatgttcgtgactggctctatgttgaagatcattgcaaggcaattgaccttatcttagaaaatggtaagcctggtgaaatttacaacattggtggtcacaacgaaatggctaacattgatattgttaaacttatctgtgattacttagacaagccatactcattaattgaacacgttactgaccgtaagggtcatgaccgtcgttacgctatcgatccagaaaagattcacaacgaattaggctggcttccagaaactatgttcaaagatgatatcaagaagactatccaatggtaccttgacaacaaagactggtgggaaaacatcatttctggcgattaccaaaattactacgatgaaatgtatggtaagaagcaagttttagataaggactaattcagcatgaagggaattattttagcaggcggttcaggtactcgtttatatccattgactttagtaactagtaagcaattattgccagtttacgacaaaccaatgatttattatccattatctactttaatgttagctggtattaaagatattttagttatttctaccccagctgacactccacgttttaaggaactattaggtgatggttcacaatttggtgttaacctttcttacaagattcaaccaagtccagatggtttggctcaagcatttacattaggtgaagatttcattaatggtgaagcatgtgccatggttttaggtgataacattttctacggtaatggttttactgacttacttaagaatgctgctgaagatgcccaaaaaggtaaggcaactgtctttggttactacgtaaatgatccagaacgttttggtgttattggttttgatgaaaatgataatgttgtatctatcgaagaaaaaccagaacaacctaagagtaactatgctgttactggtctttacttctacccagctggtgtaagtgaaaaggctgctcaagtcaagccaagtgcacgtggcgaagttgaaattactagtctaaacgatatgtacttacaagacgataacttaggtgtacaacttttgggtcgtggttatgcatggcttgatactggtacaatgcaaagtttagttgacgcttctaactacgttaaaatgattgaagaacgtcaaggcgtttctgtttcagctccagaagaaattgcttatattcacggctggattgacaaggagcagcttttagaagcagctaagcattatggcaagagcccatatggcaaacacttaaaatcagttgctgaaggtaaagttcgttactaaaatttttaattaagaaagaagctttttaaaatgggacaaattaaagttgaaaaaaatgttggtggaattgaaggtttagcagttatcactccaactgttcacggtgatgaccgtggttacttcatggaaacttttaaccaaagagatatgatggatgctggcttcagcattaacttcgttcaagataaccaatcaagctcaactaagggtgtacttcgtggtttacacttccaaaagaaatacccacaaattaagttggttcgtgctgttcgtggtagtgtatttgacgttgctgttgaccttcgtagcgactcaaagacttacggtaagtggtacggtgttgaattgactgctgaaaacaagaagcaattcttaattccacaaggttttgctcatggtttccttgttttaagtgatgaagcagaattctgctacaaggttaacgatttctggcatccaaacgatgaaggtggtatggcctggaacgatcctgaaattggtatcgaatggccacatcttaagggtgattacccgggcagtccagatgctagtggttacactcttgatgacggtactaagcttactttatctgaccgtgatcaagaatggaaaggcttaaaggatacttttaagttttaattagtgaggtaaattaatgaaagtttttgtaactggcgttaatggtcaacttggccatgacgtaatgaatgaacttgctaaacgtggctatgaaggtgtgggatcagacttagcacctgaatatgccggtgtagctgacggcaccgctgtgactaaggctccatacgtttccttagatattactgatgcagacgcagtagacaaggttatttctgaagtaaagccagatgttattgttcactgtgctgcttggactgcagttgacatggctgaagatgatgataaggtagctgctgttcgtaaagttaacgttgatggaactcaaaacatcgctaatgttgctaaaaagctagatgctccaatggtttacttatcaactgactacgtctttgatggtcaaggaactactccttgggaacctgactttaagggttacaagccattaaatgtttacggtgaaactaagcttggtggagaagaagctgttgctaataccttggacaagtacttcatcgttcgtattgcttgggtatttggtgtaaatggttctaactttattaagacaatgcttaaagttggttcaaaccatgaggaagttaaggttgttagcgaccaagtaggtacaccaacctatacttttgatttagctcgtttattggtagacatgattgaaactgataagtacggctactaccatgcaactaatgcggaattgccagcaagtgaaggcgaccatgacgaaaatggtactaagactggctatatttcttggtacgatttcactaaagaaatctatcgtcaagcaggctacaagactagggtaactcctgtaactacggaagaatacggcttatcaaaggctgttcgtccatttaactcacgccttgacaagagtaagttagaagaaaacggctttaagccacttccaacttggccagatgctatcagtcgctacttagatattttaaaggccgacggcttctttgatgagttagggaagtaaagctggatagaggaaaaagcaaactccttttttggggtgcttgctttttttgtgttgggagagaaaaactaagcaactcgatttggtccattttctttgatgatattacttttgcctaatgttgaacagtaaatgaatgacctgattttcatgttgatctttaataagaggtataaaatcttgcatagaccagaaaaaatggtaatcttcgatagggccgctcaagaagtttttttgaatgtgttaatcatccccttcagcaaggtaactagacatacgtcaattgtagttaagtacatgttggaatacgaaaaaggcttccaactagtggaaccttatcctacggagtagataggtggaaggtttgattagggaagacgcattttgatggtaattcaattaataagcaaatctttgcgtaatgaaattaaaattaaaatgcactttcaaaaaaatactaaaaaggcagaaaaattgaaagaaatagaatataatagatattaagaaaaaaagaaggagtgactatttgattatgacagatcttggttttactgacgatatggctcaacaatttgttaacggagccatgaaaggatttacagattatgtcagaagacgaaaggaggatgccgataagctcattgttagccgaggtgcaacatggatgaaaggaaattacattgatgatggagtagctaaagaattggccaacacaggtgttgaatatcagagaaagatggccgggtattcatgggaatatcttcaatttaatttttttgataatcaatctggaattaataatagcttaatatttaaaaattatagaactttaactagtggcatgcgtagtaaaagtaataaattgccagattatttagctaaagatgctctagttaatgtagatatcttaaggaaaaataaagaaaaaatccataaaaagggtgaatcaattcaacttgagcttttaccgcttgctcctgattattctgaacaggtagagactcaggtaaatggtatccaaagtcgtttctatgtagtaggatatcagttaggaaacgatggcaaccttgatactttgaatttattaatgcccaatccaagtacaaattcgttggtagaaattgaaaattggaataaatatatcgtagatgcacctatacaaccccaaatggaggatttaagtatctttcagaatgaaaaagatattcctgaaggtcaatatgatgatacttcaaatatgaggtatgagattgccgataataataaagaaaaagaaagttaatatagaggattagagaaaatatgttttatggagaaaaacttaaacagttgcgagaattgcaaggtttttctcgtaatgatctagcaaaaaaattaagtctaaccgaacaaactattggtcagtacgaaaataatcaaataactccgagattagacatcatggaaaagttactacaaatttttcatgtggatttaagtttttttaacactccgagttttgttgaaaaaaatgttatttcagaagaatcaattgcatatagaactaaagatagaaattcaaggaagaaaattaataacgagttaaaatacatagattatgctaaaacttttattgattactttgaaagctttgttacttctaatataggtggctttaatgaattaaaacagaaaattgaagagctaaaacctaaagattatactattgcttatattgctgatatcgttcgtgatttttatagattgaatgagaatagagaattgatgtcagaattagaacagagcggaataactgttttagaaaaagacttaggatcttcaatagatgcctatagtgggtttactaatgataatgaaccctatattgttttaggaaatctaaaaaagactgctgtaagaagaaattttgatttagcccatgagttaggacatttgttattacactcaaatatagttatgactgagataacagaaaaagaacatacagcaatagaaaaccaagcaaatgattttgcttcagcacttttactccccaaatatgaatttattaaggactttagtaatatcgctagaaaaaccaatcctgattattacattgcattgaagagaaagtacatggtatcaattgctgccctagaatatcgtgcatataaattaaaattgataacttatcaaggaaatcgatacttttggtctcaaatgaccaaaaagaaatatcgcaatttagaaccattagataataagatcccgccattaaaaccaagtaaagttaaaaatttgttaagttttttatttgataatgaacttattactatgaatgaattaacaaatttgtttggaattaagaaagaatttctgatatccttgtttgatttaaaggatgacttctttgataaatatattactgaaagtaaaacgtttggagataatcaatctaatttaattgattttgaacttattcgaaatcaattaactaattagcatttagtttgatgtttttaatttaattaagtttgatatataggaaagagcaagctcctttttggggagcttgctcttttgtgtaacattttttactcttttaatgtatagacatttggtgtaaattggttttgtctctattagactgtatttagaatttgataagctataaaaagatatttgttttgattgtatgaaggaaaaattatgctcatatatagagtaaatattaaaggatttcgtaattatgaagatgtagacgtgtatttaaactctagttcgttgataattggatcaaataatgttggaaaaaccaattttatttatgccttgagactattgtttgatcgaaatctgagtgaaaatgatttagatttattagatagtgattttaatgcatattcacattccgataaggtagaaattactgcatatttaaaagatattaatgaggaatgtcttctaagtgaatttaaggggaatataaatgaaggaaaattgattctaaaatatactaaagaaaagaatcaagattacattctacaggctggtttttcagaagatacaatgcaggaattaaaatcccgaagttatctaagaagattaagtatgcagtatgtagatacaaatagaaatttatataaatacttgagaaaagagagacaaaatttattattgaattctcaagaattattatctgaggaacaaaaaaatgatgacaaaacaaaaacaatagaaatacagaaaaacttaaatagtataaatgaaaagataagttcgttaaactatatcaaaaatgcgcttgaaaatgtaaataaagaactatcctctttatcagttgaaaatgaagatcaaaatattcaatttgttgccggacataatgatgctgaaaagatgttgtcagatgtggctttgtcatattcaagtgaagaaggtcctttaacgttgggtggggatggacgaaacaatcaaatttatttagcaacatggagagctaggcaagaattaaaagctggaccagatcatgtaacattttatgctatcgaagaaccagaagctcatttacatcctcatcaacaaagaaaattggcacaatatttgactaagagtttgaagggacaggtaattgtaacgtcacattctccacagattgcagaaatatttaaggctgaaaatatagtaagattatattttcataacaagtatactgaggctgcttctggacctaatgatgcacaaattaagaattcttttaatgcatttaattatcgacttaatacattgtcggctgaagtatttttttcttacggtgtttttctagttgaaggagtttcagaagttatattctataaagcactagcaaaagaaaacggtattgatcttgatagattaaatatttctatattagctgtggaaggtattggttttaaaccttacattaatatttgtaacgccttgagcataccgtgggtattaagaacagataatgatatatttaagaatagagaagaaaaatactatgctggaattaaacgagcagtaggtattattaaagagtgtaagttagattataaaaaaccatcggaatgtgataaggcctgtgaaaaatggcattgtgatacaataccgaatgatattaagaacaataatgaagcaatgagaaaatcattaaagaatatagggatttatatggcgaaagtagacttagagaacgatatagctaatagcaatctaagtgaagcgctatatgcacattattgtatttttgacaaagacttaaaaagtttagtctctaagatgcagaaaagcaaagctaaaaatatgtttgactttgtagaagaaatgcatagtaagttacaaatgttaaatgatgatgaattaatcgaaccaattgatagtattgtaactaaagtaaagagtcaggtacagtataatggaaagtagcgatgaacaaaaagaaataattaaagataagaataatttagttatcattgcaagacctggctcaggaaaaacgtatacaattgttgaaaaaatacaactaattttagaagatttgtataattaccaggggattattgcaatatcttttacaaataaagcaagtgaagagctaagaaaaagatgcattgataaaggattagcattaaataaatcatttttcggaaccattgataaattttgtttttccgaaataatagttcctttttgtagccatttaagtggtagaaatcaagaacttaagattaagagcttagaagagaatacccgactaagaaatttagataaaaagaactgtaaacatgtgggaaaaattatagaagaatatttgaagcaggacacggtttttctcgagtttttggttgaaacagccttgtatatcttaaaaagagtcccagatgctactaaatacttgcgcgcaagatatagagaaatatttatagatgaatatcaagattgtggtttgaatgaaaataaaatgtttttatatcttgtaaagcaagggattacaggaatggctgtcggtgatattcatcaggcaatttatgcattttctggaaaaaaatctgtctatctagaaaatttgatcaaaaatcctaattttcattattataaactttcagaaaatttcagatgtcatccaagtatatatcaatatgcattaagtttatatggaaattccgaagaagcagctgaggatgataaaagagtttttagagtaaaaattgatggaaatgaaaagaatattgctcaaaaaatcgaagaaaatattcccaatataaagcgccgatataatctaaagtcaactagtggatttgctattttatgtcgaaacaactcaacagttgatatattaaataaaagcctaacaattcctcataaagtatatacgaagacaaaattagatgatgatcaatcagacgtagctcacttatttgtgcaattgattagaggatattttgatgaaaatatatatgcatttgatattactgaacaatatttttcggaaagaaataaaaataataaatatcgaagtttgttgaacgcaacacaaaaattatttgcatgtcccattaataaattggctgaaaatatcactttattctcccatattgctcaaattatttatccagacatagggattgaagatatgtcagaagcattaagtagacttaaagatgtacttaatgataaacatgattatgagaactatataccaccaaaagaagacgaaattagtgtaatgaccattcataaatctaaaggattagaatttaacgtgatttttcagatggacatgtatgattatatctttccgaaagagagttggcagcaaggaggatcggcagaatcatggaaacaagatttaaatttgcattatgtcgcaattactagagcaaaagttgcatgttacttgatggaaggctcacaaagatataataggaaaggaatccaaaaatctgctaagccatctccattttatgatttacccggtttaaaaaagaggagattggacatgaagtggtaatgaagtatatctcgttattgccttagcaattgatccaaataataagcagttgtttagagaagtatttgatgagttatctgatattgtcacggacattaataacgtaactgagctgataaaatgcaaaaattacagtgagtttattattaagcttgtagagttgctataacattaaaaagataggtatatgaaagtgcgagtaggaagctagcatgattttatgtgagattcgcactagaatatacctattttgttgatacaatttatgtagaaatataattgtatatttttgaagcccgatatctagtctagaaaattaatttcaactaaatattgcggtcgcacctcacgcagatacgtggattgaaatggttggctctcatcatggataatgttgctatctggtttgcatctcatgcagattgtcagtttaattggtacaaaaaagcgccaatcaatcatccatatctcatatataaatacttatgagacatttagataaaagagacgccaaaaagtctcttttttgttttaaacaaaattccttcaaaaattccaactatttttgctgattaaatgagcaaaaaagactaaaattaaatagaattaaaagttggagtgaataagatgctttataagcaaattgagcaaaataaacgaaacacatggattattttgggattatatatagttctgctgctagcaattagtgtgtttcttggtgcaatttttacatcatatgttggaatcggtttcttcatcattggcttaatatacattgcgcatgtttattttgatgcaacacagcacctaatgaaggtgacgaatgcagttgaaattactaaagaaactgaaccggtaatttatgagcttgttgaagaactttgcttagcaggtggattgccgatgccgaaattgtacattacgcctgatccagcacctaacgcctttgctactggtcgggatcctgaacatgcaagtttagctatcactcaaggactgctaaacattatggataagaaagaggttcaaggagtgatcggccatgaactttctcatattagaaactatgatacgcgtatcactgttttagccagtgcgctaactagcttgataacaatgactggaatcgggattgtattcttcggctggggcgttttgactagtgagactaaaggaatatttggcttttttatcaaaatcttggctcttattgtaatcgcagttggaggtattatttcaattattggaattccgctagctaaactgcttttcttgcttgtttcaagacagagagaataccttgctgatataggatctgttgatttaactcgtgaacctagtggcttaatctcagccttgtctaagttagagcagctagaagagggtgcagctacacctgagattagttcccaagatttaactttgcagcatttatattttaattttccaaatgcacataactggttgaatcgacttttttctgatcacccaccgttggataagcgaattgaacgattgaaaaatagtgacaaaatcaattaatttaatggctgaccatcattgatgtttggctttttattgtgtaattttagcgattgattgaaactaatgaaaaatgatattatctaaattgaggattgtacttatatcaaggatcttttagtgtgttcttcacgtaagtggaggtgatcctaatcaaaatccattaaacgttctaaagtcaatgtgttctccacatatgtggaggtaatctacaggaccatcgaattctatagaaactaatacaatgaattagatatctcatagtaagaagaataatgacactatgctaaaaaagcgattcacgagtctactatgaaagtagtagatagttaggtggacgcgcatagaagtcagatacgtgcacgtacaaatctcgccttgcttgtcttaaagaagacgatactcaaacgagtgtcgtttttattttagtattttttctcgagaataggacttaaatatttaataaaaataattcaaattatcatcccataactaaatacactaactctacttgttatgaaataaagcattgataagatatttctctttgttgtacagcagcaaaatcatcacgtaaagcaggtttaaagcctgcttccataacaggctaatccgtaatttgaaaactcaattcgttatataatctgtataattttttaactaaaaatgctagaattattgatgtattcaaatagggaggttttttgatgaaaaaaagatatcttttaggagcattaggtttagtacttttgggattgggaacaagtgcttgctctagtcaaagtgataatagtagcagcaaacaaacaactactagtaagtcaaagaagtctgtcgaaaagacagatgaaagcagtagtgagagtacaaaacgctctaaaaaagatttaagtacagcggctgacaatcaagctaataatagtaacagtgacgacggtaaagcttatggtggaaattttcaagatagcaagggatacatagctatcaataatgtaaccaatgtcgttgttaagggttctgatggcgatgaccattatgctctagtgcaaggaactttcagtaataatgctaaagaaagcgttgatccaacatctttctttagtaatcacttaaaagtaatggagaaggttggcaaagctacccatgatcttgttttggtcaccacagacattgaaaatgaattaacgccttggggaaatcagattaaggaaggtcgtaagaaggttgagcctaatatgaccggtaattttgttatagtatataaattagatcctgcaaatggcgctaaaactaatgcaacccattatgtatttgatccttacgattctaaatttggtaaatcattaactgtaaaagtttatgagtctaagaccattaagaaatctagcgataatgcaagcagcaattcacattctgacgaaagtacagatacaaattcaagtgccgatacaagcagtaatgctgatgttgatacagatgactaattaaatattaaaaaactgagaactatgaggggatttcataattctcagttttttattaggtagtattattgtccaattaattgctgaaaatcgctaactagtttttgaaaagttgcatttaaattctgcataaattcattttgattatttttcatttgatctaataatgaatcggcctgatttggattttgtttgatttggtcgatagtagagcccaattgatcaatttgattttgtaaggcttgattattagcagcattatttttcaattgttcattttcagttttgatttggtttaattggttttgtaattcttctttatcttgatcctgcttatatgtgttgatagcactttgcaactctttattttgttgcattaattgtttgttttgctcagacagagtatctaatttactattagtattattaagagcattactttgagcttgctcattttgaaccgtatcattatgagcctgacaagctgaaataccaaagatgatggcaattagtaaaacaagtactccaagaacaatatatactatctttttcttgcctttctttttaggactagcaggtttattaggagaagaagtatatggtgctggttttgctggagctggttgaggagtaggggaagaatcaactacattatttttatccgttacccaggcttgaattttcttggtcgcatattcattattagtaccaattgcggtgataattataggatatacgcctgcttcagaccggttaaccgcctttttatttatactaagattatcatttgaaataagatggccattttctgtaactgtaagttccaattgagagattatttcttgattggtcaaattttgattaagaggccaggtaattgagtctactctggtattgatttgtaatgtcatatctaaattcctttgaaaaattttagtctatttaattcaattatactaataaaatttacttagagaaatgaattaacagcagtaaaataaaacttaaacaattataaactatagaaataatataattaaaattatgtaaaatggagaagaaatgaaaagatcagaagctgtaacattaactaatatgtgtatgataaaagataaagacaaaattttagttctaaatagaactgatccggtttggcctgggttgacttttccaggtggccatgtcgaatctcatgaagcttttcatgattcagtggttagagaaataaaagaagagacgggattagaaattgaggatccgcgtttagttggagtaaagcaattttttgaccataatgatgaacgctatcttgtctttttctatgtagctactaagtttactggtacattaaaagcttctgatgaaggagatttaacttggatgacaagggaagaaatagaaaaatcaaaattagcatataactttgatcatgatttaccaatctttttcgataaaaagttaagtgaacatatcttagatggagatagagatcaaacttattaaaaaagacattcgatcgaatgtctttttattagtcttgagtattttcagttgagctagttgattcagattcattattttgactagctggcgtttcactttccttgcttgaacttgaagaagattcagatgaagcagtagaagatgatgaagtgtgcgaattctcagagtttgaactacttgtagcagaactttgagtagttgcatttgcattactgttagtagtccagctgttatcaaagtaatagttaggtttaggattataataagtataattacgacgtggaacagtatagaaagaagtaccagagttagattttggtaggctactgcttgccttatgttcactgcgttgaataggtaaagtagtacttgatgaactagaactttggctttcagaactagattgctcttctttattttggagactatctagttgatcatccatcttagtgtcttcagcttttttctgatcagttttatctactttttcccttttatcttctttatttttaggtttctctttttcaacttttttatgagattgcttatgagaagactgaataatggcatagtctgctgcagaagatttatgttttggctcaaccaagttgttgcgacaacccgcaagtaataagagactacaacttaaagcaccaacgattaactttttcaaattaatttcctccatttaaaacttcttttattataaccaaaattattaatataaaacagtaaaattaagcgttgataagaaggtatttgaaaaataatatattatttttccagtttgggagctcaaagtacatattttttctagaaaagatataatagatatgtagttaattaatttgttaaatttatttttagataaagatgttggaggtcagtttctatgtatgatcttgaagacgttttaatgaaatcttttagagaagataatggcatcagttcggcattttcaattgagccggttgatgataatgaatatcgtgtttcaactaatgtggttgatggcttgaacgatactattcacttttatttagttgtttatcctaacggaacctatgccttgaatgatcgcgtatttacggcacaaatgattgatgataatatcgggagtttcgcaagtattgccagtgatgtggcacgtttagctagtgaatttggtgtattattagatgatcgcggagaactaacacgtgactatattaatgctcgcgatcttagaaatgaagtaaacaactttactcaattattaaatcgtgtagttgaatttgcccaaatccatagataatttaattacaagagaagaagctgaaagcagaagcttctttttttttgcctaattaagttataatttgaataaaaacaaggagagaactatgaaagattctgaaatagagttaattgggcaaaatgccatgaattggttaaaagaaaatattcattttataaaagctggttcagatattgaggtagcaacacccttaattggtgcatatggggacttagtatattgctggattgaaaaagaagatgattactaccgcattactgatgatggaggaactttatttaagcttgatcccggtcaagaaaatatggatttacttgaagaagcaatggatattgtaattggagctggttttgaatttgatgaagagaccttagaaatttaccaagtggtagatcaagacgatatcccagctacacttaacgatctgactcaattacaggttgctttgacttatttagccagctgatagctttcccatcataattaagtttttaagcatatgttttttgtttttaaaatgcctatgatataaataattgtgaaagcgctaataatgcgtatttcttaaaatattacaaagaatgtaaaaaatatcttaatttgtaacatttttgtaaaactacggtataataaaagtaaataaaacagcaagcttaagtatagcttaccttgctgaggagcgtgaattatgatgagaaaagttaagaagagaagtatcattacaagtttgggtgcagctgcaatgttagcatctttgagtgtaggtggaactgcttttgcagcaagtactacaagtactgatagtagtaccgcaactactgatcaagcaaagacttatcaaactcaacttgaagaacataagaatttacaagcttatactaatccattaactgtccaagctttaactactactaagggtgttttgcctgatgcaacaagtggtatttctaattggagtcaggttccagctggaacagtagctgcttgggataataaacctgaagttaataaggccggaactagttacggaacagtttatgttactttcccagatggatctagatcaagattagcagtttacgtaacagttaaagatggtgcagctagtcaaagtagtgaaaatacaaatactacttcttcagataaaagctcttcagctgcaggaacatcaaaatcaactgctaagagctcacaaatagaaggtgaagctaagacttctgcaaaagacgctgataaccatatggagaagtcaactactgttgagaaaactgataaagatcaagcagcaaaatccagttctaaagctaacgaagatgtagttgtgaaggatttaggatcaactactgttactgaaaaaaatgttagtgttgtaagtaactcaaaggataaggacaagagttcaaatccaatttctgttgctactcgcttaccagaaactgtggctaaggctactaatccatttgtaataatttgcggtgcattaattgcagccgtaagtggtgcagtaatttggagtaaaaaattaaagaaaagaaactaatagacaataaaagaggtcggaactataattgtttcgacctcttttattatttatctttatttttgtccttatctttgctattttgagcttttttctttttaggatcatctggcaagatagcaaatttatcaagcattttttctaattgattatttttttcaaaagttaaacccatatctatctttagctcctttgaattaagataagtgaattataccctataactttaactaaaaaaagtaagctgcatcttataagcagcttacttttttagttttttcgtcttaatttagctaaaaagtcttcatgttctttttctaacttttcatccttatcaataaagaagtagcaggcagccgcaatcactgcaactacagcccctaagagtagtgtcttaggagtaaagttagtaaccatataacaagaaataatcaaagcaataattggaatagtgtattttccaggtagtgaaaaaccgtgtgttgggtattcattactatgcttaaatttaatgactgctaaaattgatggcacatattgaacaaaggatgctaaaactgtacatgaaacaaggaataggtagctttgagtagctaaggctcctgaaagaacagcggtaaaaataataccaacccaaggagcatcgtgtttatttttcttaccaatccatttcggaagcatcccatgttcggtagcaagggatgcaataagtgaaggagtattaaatgaagcactaaaggcaacaccaaagattgaaattaacattccgacaatcataaaagcaaaaccccattggccaacaccagtctttagagcactcgctaatggattagaataacttcctagtttttgcccacttaaaccaattgcaactaaaagcatcaagcaatctagaattgttacactagtcattactgcaattaaaacgcgtggaatattcttttctggattattcatttgctttgcggcaattggaataaaagaaaatccagtaaataaataaaaaattggtgtgaaggcagccccaaaatgtttaaagaatgggccaacaccggttaaagctgcatgtggaattaccggagtaaagtgagctttcttaataaagaaggcccccacaataatgaagacaagtaatgtaataatcttagctgcagctgaaatgttattaacaatttttacccaagatctaccaaagaaattaataattgaaaacagtaaaattaagaagataactccactaatgtagactgcattatttttaaaaataggtagaaaactctttagaatggttaataaagcaactacttcagcagaaagagttgtacatcctaaaaaccaagtaaaaatacctagttcataacccgaaaaacgcccaaaagcattatatgaataaagccaagcggctccggattgtgtgaaacggctggataagtcagcatagcataaagcaatcatgctgacagtgacagcagtacagagaagaacaagaatagctgttaagttcatgtaacgataaattacagaaggtagcaggaatgtccctgatccaatgactgcattaatacctaagaaatagatagatataaaggaaagtttcttaggtacggaacttttattagtcatatttttacctctctatctaataatgttctcctttatctattgtagtgctttcgaatagtaaatctatacgaaatattcaaaaaagataataaaattgatcttaagtagttgacttattaataataagtaatactatgaaattgtaagtgaggatagctaggtaaggagaaaatcatgactgagattattcaaatttgcactgtagtcaaataaatatgtagaacttttcattaaaattattgattttgtgatgcgaggaaaataaaaatgacaaagattgctattttaggtgctgctggtcaaattgctcaattagttgaaccaatgctattaaagaagacggatgtagatatggttttatatttgcgtcatcctaataaattacatcaagttgatgaaagtcgagaagagataatcaagggtgatgcaagcaactttaatgaattaaaggcagcattagcaggtgttgacctagtttacgcaaacttagctggggcaaacattgaagatcaagccgaaactgttgttaaagcaatggatgcaaatggcattaagcgcttaatttgggtttcttctctaggaatctataatgaagtaccaggaaaatttggtgaatggaataagaatgttttaggttcttacttaaccacttatagagcagcagctgataagattacagaaagtgatttagattacaccattattagaccagcttggttaactaataaagatgaagtaagttatgaaaagactgttggtgctcaaactccattcaagggaaccgaagtgtctcgcttgagtgtagcagactatatagttaatataattgaaaatccagcagaggatcttaagagtaatgttggtttagataagcctggaactgacggtgataagccagcctggtattaaatttaataataagaaaaaagaacggtttttaaaccgttctttttggtgtaaagggagcaagtttaagcttatctagttgattgcgataataagtcaaactcttacgattacaatgtaggatttccattaatttcaagtcagagaggctagggtcatttactttatagtaaatgtaagaaaggcgaagttttcctggggtaagatcaaaatttaaaatgtccttgtctggagcaatttttctagttaaagaggttaaggcagagatttgtttaccggtctttgtttgaaaaataagaggattttcttcagtattagtcaggagaatagagcgatagtttgaatttttaatacttgaaatattagccttacttaaattaagaaattgttttgggtcaaagccgtgagcaatcaaaattagaacttttttgcaatcaagactaatttcaggccaagttataatttcatcaatctgatcaatccaatcaatacaaatatgcggagttcgatcaaaagtatagccatgtaaatcggtaaaaagataatttttaactaattggtggtcatagagaaaagaaaaatatttctttaaatgggtaacatacttattaatcgtactaattgttttattttgatcttgctctaagtggtcaataaaggcgcggatatcttgagcagaaacattactaactttaggttctaaatttgaattttgtaaaaaatagttccaaaaataatagatcgattgattaattgaagtaattgttcgcggcgcaagattttgactactgcaccattgattaaaatttttttcgtagggaaatagcatttttatacctcattaacaaaaatgtaattgttactttaacatatatctaattataacaaaaaaggttggcgaacttccagtccgccaaccagtatatagcaaaattttacttcttaattcgagatttgtaccatttaattccaaagtaaataaatagaattagtaaaaggataataattacgattgtgtaatcatcaaagattctaactacgacttgccaattctttcccatatagtgccctaaaccaactaatacactattccaaactaaactacctaaagtagtcaagactagaaatttagtccagccgacatgggcaatacctgcgggaattgagattaaacttctaacaacagggatgcaacgtccgtaaaaaatggcgccaattccatgtttgtcgaaccaatcaatggctttttgagcatcatcttttttaaatcctaaaagtttaaataatttagtttcaagtaatttttcaagtcgtggcagtgttagattacgacttattgaaaatagaataatcgcaccaataattgatcctaaagttgaagctaggataactccgattagagttaatttagttccactaactaggaatcctccaagggtcaaaatcacttctgaaggaataggtggaaaaatattttcaacggcaattaaaagaataatggcaagatagccgaaattttcgataaagtgtgttaaccaaattgtcatttatatatttattgtctttctaaaattttatctactttcttaaagaataaatctttatctgcttttgttacttcagtaatttcttttccattagggtcgataaacatgcgaccacttgctaaccctgatgtaataacatttgcttttacctgacgtgtctcaacaagttcagggtagagagctgacatagtggttaaaacgtcccacaaatatagctctgcatttggaacagaaataattaagctgtatcctaaaccaactaagtcaatagctggatactttcttaaactagcccagtgctgacgaagttcatcagttaaaggaagttcttcggtactttctaagccgaccatttgaattttaagatcggaatctagaactcgtctcactgcatccggatcccaaaaagcattccattcttgagtgccgtcagcatcaacgctaactacgtttccatgtccgtccagagagccacccatccagtagactttttcaatttttgattgaattgaagcatcttcgtctaatgctcgagctaaatcagtgattggaccagtcattactaaggtaacgggaccatctgcttttttaattttatcaatcatatctaaatgagcaggcaacgcagcttctggggttttaatttcaccgctctcatttaagattggaaagtagttaaatgagtatgttgccatccgccactcttttggaaattgatgaacagcacgtgaattagagcgagcaacttctaatttatcaccacgtaaattgaatctatcgaccattttccgacaagcttccactgagggatcgatatatccatcgccatcaatggcactaattccaatgagtttaatatcaggcgcttgcaagagtaaaagaagtgaaactaaatcatcgatgtttccatcatgattaaaataaatatttttcattatttgcgacctttctttttggctatttactattctataagaaaatgaaggattgagtaaacaaaaaagtcatcttacttggttttaagaaggaacgtgataaaatactatgggaattttaataggaaggaaaaataatttatggcaacggaacatattgaaaataaattaaaacttttgccggataagccaggttgctacttaatgaaagatgttaacggcaatgtgatctatgtgggaaagtctaagaacttaaagaaccgcgttcgttcctattttaagagtaaacaggtggggagacgtgctgaacttgtacgtgaaatacgtgattttgatatcattactgtctcatccgataaggaatcttttttgttagaaattacactaatcaaaaaatatcagccttactataatgtccaattaaagcaaggtacaggctatccttacattgaaattactaatgaacgtgatccccaaacacgtttaacatcaattgttcataaggatcacggttactattttggaccttatccaaatgtttatgcagcgcaagcaactttgaaatttattcaaaaagtctggcccctaagaagatgtaccggccatcaaggacgtccctgtctttactatcacatgggacaatgcttgggagcttgctttaaagaggtgccaaagagtacttatgatgctcagattagaaagataaagcgatttttaaatggagacattgctcaggttaagcaagatctgacagaaaaaatgacacaagcttcaatggatctagaatttgaacgtgctgctgaaattagggatcaattgaaatatattgagcaaactgttgagaaacaaaagattatttctaatgatcatactcaacgagatatctttaatttttatgttgataagtcttggatttcaattcagattttctttttaagacaggctaagttactacgtcgtgaaacaagactatttcctttaactgatactaatgatccacaagatgcttttgtttccttcattgctcaattttacggacagcgcaatcgtgtcttaccaaaagaagttttagtaccggctggaatggataatgaatctttatctgaagtgctaaaggtaccagtaagaacaccacaacgtggtcaaaagaaagccttgttagaaatggctcatgacaatgctaagttgaaactagatgaaaaattccgcctcttagaactaggcaatcgtaaaactaagggtgcgcaaaaagaaatttttgacgctttagggctgccgtatggacatagaattgaaagttttgaccactctcatattcagggagctgaccctgtttctgctttggtagtatttactgatggtgaagctgataaacatgaatatcgtaaatacaaattaaagggtgaggttgaacatcaaaatgcggctgatgaagtaggaaacacccgtgaagtagttagaagacgctacagtcgacttttaaaagaacataaaaaaatgccagatcttattttaatggatggtgggcaaattcaagttgaagcttgtttggatgttttaagaaatgaattgaatgtaaatattccggtcgccggaatggtaaaagatgatcaccaccgaactaatcacttgatttttggtgatcctacaaagggagaagaattaaagctaattcctttagatccaaaatctgagggattttacttaatgactagaattcaggatgaagttcaccgctttgcaattacttttcatcgaagaacccatgccaaaaatgctctttcaagtaaattagatgaaatcaagggtattggtcctaaatctagaaataagcttctaagaaagtttggttctttaaagaaaattaaagaagcatcagtagatgaattaagagaagctggtttaactcttccacaagctcaaactgtaaaattgagtttataaattaaccaataaaagacctgatttaatggggcttgatatggtattatagttaagaaactttaaggaaatttttaattataaattgatatataaaggaggcacacataatgtttgtcgaccaaacaaaaatagatgtacaagcaggaaagggcggcgacggtgccgttgcttttcgacatgaaaaatatgttccacttggtgggccagccggtggagatggtggccggggaggtagtattatattagttgctgactccggcctaagaaccttaatggatttccgctttagacgtaagtttaaggcagataatggtgaaaatggtcgtattaaatctcaatatggccgcggagctaaagatgtaagattaaaagttccaatgggaacaagtgtctatgattttaatactggcgagcttttgggcgacttagttgaaaatggtcaagaattggtagtggctcacggcggaaaaggtggtagaggtaatatccactttgccactccaacaagaactgctccagaaattgctgaaaatggtgaaccaggagaatttcgtactttacgcttagaattaaaggtcttagctgatgtcggactagtaggtttcccatctgttggtaagtcaaccttgttatctgttgtaactaaggctaagccaaaaattgctgcttatgaatttacaactttaactcctaacttaggaatggttgttcttccagatggccgtgatttttcaatggctgacttaccaggattaattgaaggtgcttcaaaaggtgttggacttggaattcagttcttgcgtcatgttgaacgtacaaaagtaattctgcacttagtttcaatggatccaaataatggccgagatgcttacgaagactatgagacaattcgtaaggaattagcaggttacactaaggacttaactacaaagaaagaaattattgtagcaacgcaaatggatattcctggtagtgaagaaaaatttgcggaatttaagaaaaaactaggagataaaactgtctatcctatttctagtgttacccataaaggtgttagtgaactaatgggtaagaccgcagatcttgttgaagaagttgctaaagaagaagctgaaaaaccagcagaaatcaaagttgccgaaaaagaatatgtttataagaaaccagaagatgaaggctttaaggttgaaagaacaggcgaacacagctttgttgttacaggcaataagctagagcgtcttgttcaaagaactaaccttgaccatactgatggaattatgcttctagctcgtaaattaaagcgcttgggtgtagatgaagctttaagagaaaatggagcagtaactggcgacgatgtttcaatagctgactttacttttgaatttgtagattagaaaatttgaaaaagttgggagtaagacttttgaataaaaagaaccgctttattacaggttatgccggacttcgtgctctagccgttattggagtaattctatatcaccttaatccaaaccagtttatgggtggatatttaggagtaccgatatttttagtattatcgggttatttagttacagaccatatgtttcatgcctatgaggagcggggagagtataatttcaaatctttctacatcaggcgaatcaaaaaattataccctcaaatgattacactgttgtggggatgtagtgcctatatcttactttttcagcagaatcttctagctaagttgaatcaaatagtcgttactaatttactgaacgtctataacttttggcagataaagaatggacaaagttattttgaacgatttgcagctaatgaatcgccatttgttcatttatggaccatgtcaattgaaggtcaattttacattatttggcctctaataatctttttgctagttaagttcgctaaaaagaaaaaaacaattttttggattattacagccttaactttattttctgctttagagatggcatttttatttaaaccaggtgttgatacaagtagaatttactatgggacggatacaagattcttctctctaggtttgggagcaatgctagcagttttttggccaacttggaagttaaatgcaaatctagaaaaaagagatcattggctcttaaatattgtgggagctatatcattagtagctatcttactaatggcaacgagtccaatttttaatccacaaaaagcatttgcctatcgtggagggatgttcttcttttcactagtaacaacgatttttgttggaatcattgctcatccaggcagtagctggaacaagtggttaactaatccagtatttaaatggattgggtcacgttcatatggaatttacttatatcaatttccagtaatgattttctttgaagataaggttaaagatattgccgatcatgtggttttatatcattcaatcgaagttattttaattttgataattgctgaacttagttatcgttttattgaaaaaccatttggtcgaattgattgggaaaaggttcgtcaattcttaactaaggccttaaatttacgagcaaaacactatcaagcaaagatacttttcgcaacagggataatagtttttattctaggtagttttggaattttaaaagcgccaactgtcaaagcggaaaatcctaatcactctcaactagctaaacagattaaatcaaatcgtagtaagcaactaaagaataatcagaaactaattaaagaagctcagtctagaaagaaaaaagcaccaacttcaagagctgatcttataaaacaagctaagaaagcggcagttaccaaaccggtaaataaagactttgaaaaatacggaatttctcaagttgatttacaactagcacaaaaaattcaggtgactgccattggagattcagtaatggctggatctagccaaaacttacaaaaattgatgccacatttaatcattgatgcagcagtttctagacaattgggtgatactattccactttttgaacaatacaaggcaaagggtgctttaaatgataatgtgttaattggcttaggtacaaacggatcctttcaacctcaagaacttgatcacttaatgcagattattggcccaaagagacatgttttttggattaacactcatgtgccaacacgtgattggcaagatcaagttaatggtgaactagatgcagcaacgaaaaaatatccaaacttaaccattattaagtggcatgaatttgctggtagtcatcaagattggttctacgatgatcatacacatccaactccagaaggatcgaaattttatagtgcctatataactaaagttttagttactgaaggaaaatattagaaatagggttttcatggaaatacaatttttaggaacaagtgcgggacaaccatcaaaaagtagaaatgtttcttgtatcgcactaaaattattagatgaattaaatgaagtatggctatttgatgtgggagaagccacacaacatcaaattttaaagactaacattagacctagaaaagtaacgcgaatctttatttcacatactcatggtgaccatatttttggacttccaggttttctctcatctcgttcttttcaaggcgatggtggtccactaacaatttatggaccagctggtattgaacaatttgtacaaacttctctcagagtttctaaaactcgcgtatcatatccgattaagtatgtggttttaaaagaagatggcttaatttttgaaaatgatatttttgcggtctacacagctcgtttagatcaccgagtaccgagttttggctttcgtgtagttgaaaagccacgtccaggtgaattattaatggataaagtggcagaatacaatgtgcctaatggaccgcttcttggtcaattaaaggccggaaaaataatcacattaagtgatggtcaaaaactagatggacgtgattttcttggagaagagcgtccaggacgaattgtgacaattatttatgatactcggccgacaaaaaatattggtgaattagcagataacgctgatgttctagttcatgaatcaacatttgatggtggagaagaaaaaatggcccatcgctacttccattcaacttgtttggatgcagctcgagttgctcgagatcataatgttggagagctttatttaactcacatttctgctcgctatactggaagagctggtagacaattagaacatgatgctagaaagatttttaaacatactcacttagctaatgatttagataattttgaaatcacattgaggggataataatatgagtaattcattaagggataaagtcgtagtagttacaggagcttctagtggtattggacgctcaattgctttagaaagtgcaagtcgtggtgcaacagttattttgatggcacgtcatcaagataagttagaagaaattgccaacgaagcacgtcagctttctggaaatgaagtatatgtatttccaacagatattagcaaagctgatcaaattgatcgtgcctttaatgaaattgttagtcatgttgaccatattgattatcttgtcaacgcagcaggttttggtgtctttaaagaatttttagagacttcacctcaagtggtgactgaaatgtttcaaaccaatgttttaggcttgatgtatttcactcgtcttgttgcgcgcgtcatgatcgatcaaaagcaagggcaaattattaattttggctcaattgctggaattgtaccaactactaagactgcagcttatagtgctactaaggcggctattattcaattttcaaacgttttacgtctagaattgaaaccttttggtgttaaggtcatgacagtaaatcctggaccagtttatactaatttctttaatattgctgatgaaagtggttcttacgtgaataatgttcaacgtttcatgcttgatccagatgatgtagcttggcaggtagtccacttctttggctctaatcgtcgtgaattgaatttacctctaagcttagctaccttagcaaagctttaccaaattttccctcgtattggtgactgggcaagtctaaagtttgctagcagaaagtagggaagaatgatgaataagcaaagaaatttagtaattggactaattatcgttttagtgcttgtgatttttgcatgcctaaatactgaacctgtagcgattaattttggctttttccaacctaaaatgcctttaatcatcgtcttagtgattatgcttctattaggtgctttagtatcacttttgattggcaaaggagaaaaagtttctcccgatgtaaaaaaagcactagcaaaacagaagaaagaattagataataaatatcggagtgaaattgaatctagagataaacaaatagctgaattaaaaaaagttaataattctgaagctacaaaataagattggacttgatttatcagctcttagattgtatcattgaaatacgtgagtatttagtgaatttgtttatttaaaggttcgcaagtctcaattctataaaaaaggagatctaactaatggcagttcctgcaagaaaaacttctaagcaaaagaaacgttcacgtcgtggtcatattaaattaaccacaccagcaatgcattacgatgctactactggtgaataccgtttaagccaccgcgtttcaccaaagggcttttacaaaggccgtcaagttgctaacgaaaacaagcaacaaaataacgattaattaaagacaccttggggtgtctttttttatataatttttgattaaaggaataggtattaatgaaactagttattttacactcaagtgatacgcatggctttttaatgccaactgattatcaagataaaaacaattatgatgcaccaatttcacttagccgggtaagcagtgttgtaaaaagtgaaaaagaaaaatacggcgcaaataatgttttagttacagatagtggagattgtttgcaaggatctcctttagctagctttacacataagctccttgaagaggaaggattacgcaaatttactgaagcgtataacgaagtaggctatgatgcacgtgcattggggaaccatgattttaattatggattagattacttgtcatattacgtggataataaccgtgctccgtttattaatgacaatgttttagatgcagaaactaatgtgcctttttttggtaaagaatacactattattgaaaaggctggcctaaaaataggaattatggggattactacccaatatatttctcactgggaatcagaagagcatatcaaaggattaaagtttgtttctggttatgatgtactttctaaattagctaagaaattgcgcccacaggtcgatattctttgtgctatgtatcatggtggctttgagagtgatcctttgactggggaagcaactgagccccacactggtgaaaacgaaggatataagattttaactgaaattcctgaaattgatgtctttttaactggacatcaacatcgtcgcttaaacttagttacccgggatactgcaattgttcaacccggatatcgaggagaagcggttggtaaagtagttattgattttgacaaggatgaaaaaggcaaggtcaagattaatgagatgactactgaattaattgatagcaaagattacgcccctgatccagctattgaaaagattgttaagagccttgatgaagagactcaaaagtggttagatcaacctattgctcacttatctgagcctgctccaattgaaaatgcaattcaggggagaattgagggagctccattcattaaccttatccagcaaatgcagctttggtttactggtgcagatgtttcagctactgcaattatgtcagaatcagctcatggattttcaaagaatgttaccatgagagaagttttgcttaactatccatacgcaaatcaactttgcattgttaaccttactggaaaagaattaaaggaaatcattgaatattcagctggctttttagaaaaagataaagatggtaaaattaaatttatcgatcgttggattacacctaaaccaatgttatatcattttgatcttttctatcctgttaagtacgaagctgatttatctaagccagtgggtcaaagattgactaaggtgactttagatggtaaagatcttgaagatgacaaggtttataagttagctgtgaacaattatcgtgctctcggtggaggtttctacccagcttacagtatggataaaattgaaaagatctttgaccaagattatgttcaaatgtttagtgagtacttaactcatgataatattaaagtagatacaagtaagaattataaattttactaagaaaaaaagctgtttcttaattgaaacagctttttataatattcaaatttaattcaattataatttactatacttacttttgtctttatgacttttggcagtaatggcaggaataataattgcgaagagcaagccaaagactgcgccaataatcaaagattgcataggattaaattgcatcctgagttaaagatgcagcaataaaaccgataatttcgcaaaaaatgcatgaccaaatcactgtaataatgtagcgcataatttctccttctttcgctaggtatcttagcaaaaataagatgttttagcaagcgaagataatagaatttgctatacttaaattatcagaaagggtgagtatatgggagcggttagtttacaaaatttaagcggttttactctacttgagagtccaactaaagttaaaaatttagctgaaaatgctaagaaaaaaggctattctgcgattgctttaaccgatatcaatattacttatggcctggtcgatttttataaggcagcaaaagatatcggaatcaaacctttgctagggatgcaacttagaattaatggcttaattgatggagccaataagtatgatctcattgtaattgcaaaagatgaccagggatatagaaatattttacgtttatctagcgcagttaatcttttaactgaaaatggcgaaaaagaaattgttctaactcttgaagatctaaaaaaatatctagggcatttaattctaattactccaagcaatttacatagtgaactaaaaatgttgcagactaataatcccaaggtgggagcaaactatttgcgaaaggcgcaagatcttcttcctagttcatcttccatgtatttaggagtctatgctgattcaggccagcaagaatatataaattatattcgctcattagcaacacaatttaacttacctctaactgctgtagaagatggacagtatcttaaccgtaatgagcaatttttaagacgtacgctgcaagcaattaaaactaatactcatttagaaaatatagagcagctagctaaacaagcaggctcacactatttgaaaaatagtgaagaattgcaagtgatttatcggaagtttgatattgaagatgcgttaaaaaatgcagaagaaattggaaaaatctgtactgcagaaattaaatttcaagatccacaattaccaaaatttaagcaaaataaatttcctacctcaaaagaatacttgcattctttggctcaaacgggtcttgcaaagagatttaataaccaaatccccactaaatatcgggaaagacttgattatgaattacaagtaattaatgaaatgggatttgatgattattttctcattgtgtgggatgtaatgaattttgcacatagtgtccatattacaacaggtccagggagaggatcagcagctggatctcttgtttcttatgcccttagaattactgaagtggatccaattgaatataatttgctgtttgaacgtttcttaaatccggctcgtcagcaaatgcctgatattgacttagatattccagacaatcggcgggatgaagtaattaagtacatgtttgaaaagtacgggatgaatcatgcagcccagattttaacgtttggtactttagcggcaaagcaggttttaaaagatgtttgtcgtgtttttggattaaataaggtcgaaacctatcgttggttagatgccattccgcactctaagggaaaaatcaccttagctgaggcctatcaaaaatcaaaagaattgcagctactagtgaatacgaatgaattgagtaaaattttatttgcgaccgccgagcatttagaaaatttaccaaggcactattcaattcatgcggctggtttagtaattactgatgattccctagctgaaatcgtaggacttcaagcaggtcccctaggaattcccgtaactcaacagacaaaatcgaatgttgaatcactaggtttgttaaagattgacttcttgggattaagaaatttaacgattttagggaatattgttgcagctttaagagcggatggaattaacataaaccctaaccacattcctctggatgatcaagaaacacttgacttgtttcaacgcggggacacggatgcagtgtttcagtttgaatctgatgggattaagcgtgtccttgaacaacttcatccagatagttttgaagatattgttgcagttaatgccttataccggcccggtccaataaataatattgatcatttcatcaatagaaaacatggaaaggaaagggttcaatatcctgaccctagtttaaagaaaattttaggcactacctacggggttttggtttatcaagagcaagttatgcaaacagctcaagttttagcaggtttttctttaggagaggctgatctgttaagacgtgcaatgtctaagaaaaatgcggatgtaattcagcgtgaacgagctaagtttattgaaggtgcaattaaattaggccgtaaaaaggaaaccgctgaaaaagtttatgactacattgcacagtttgctaattatggatttaatcgttctcatgccgttgcctacagtaagattgctttttggcttgcttattttaaagtgcattatcccggagccttttatttagctttgttaaacagcaatatgggtaatcgaaataaaattgctcaatacctaatgcaagctcaagaagctggaattaagattttgccacctgatattgaaaatagtaagacagatttttcattagagaatggaaaaattttagttggattaaaggcaattcggggattaagaagcgacttattgaagcaaattttagaaattaagcgtccaattaagtcgatgaccgattttctctggaaaatagataataatttgctgagtgcagatgcggtcgaaaatttaatcaaggctggaacttttgatcgactagctcctaatagaaatgaactgttaaaaataaataaagatttagttgagagtgtaaaaatggcaggctcaaatttatcgttattcgaaacattagagcctaaagtagaagaagaaaaaatgccaactgcagctgaaaaatcagcgatggaagttgaagctatgggttttagtactggcattaatccgattattgcggttcaaaaatatgctcgaaagtttaatgcaaaacgattacaagtttttgagagtaatgaacaaggaattgcagttggaaagttaataaaggttaaaccaattaccacaaaaaaaggtgataatatggcttttgctgtttttagtgatactagtggcgaaaaagactttactatttttcctcaagtctgggaaaaagtaggtgagaacttgaagattggtgagatatatttacttcaagttaggacacaaagtgatcgttttaaccctaacaaaattcaatttctactttctaatgctcggcaagttaattttaaagattaattcaatttttttaaaagcaagcaaaagagagcctaataaggttgaaagcgaaaacatttattttataagaattattagtgaaaaaataggcttttttttgaagacattgagtaaaaaaaatggtacgataaaatcgatgtgagtaaaacacagaaaatcgtagaggtgaattcatgaaacggattggtattttaactagtggtggagatgcccctggtatgaacgctgccattagagctgtcactcgtacagctttggcaaacggtatcgaagtttgcggaattcgttatggatatgctggtttagttgctggtgatattttccaaatgacttctgaaacagttgcggataaaattagccgcggcggtacttttctttattcagctcgtttcccagaatttaaggaagaagaagttcaacttaagggaatcgaacaattaaagaagcacggaatcgatgctttggttgtcattggtggtgacggttcttaccacggtgcattgaagcttacaagacatggctataatgctattggtcttcctggttcaattgataacgatattccttatactgattacacaattggttttgacactgcatgtaatactgcaatggaagccattgataagatccgtgacactgcaacaagtcaccaacgtgtatttgttgtaaatgttatgggtcgtgattgtggggatatcgcaatgcacgttggtgttgctaccggtgctgacgcaattgttattccagaagaaccttatgacattaaggaaattgctgaaaacttgaagcaaggatttgctaatggtaagaaacatggaatcgttgttttagctgaaggtgttatggacgctgaaaaatttaaggatgaacttcttaaatatggtgactttgacgctcgtgctaatgtattgggccatatgcaacgtggcggaagcccaacaatgcgtgaccgtgtagtagcaagtgaaatgggtgcctacgctgttaagttattacttgaaggtaaaggcggcttagctgttggtatggaaaacaacaagcttactcaccatgatattcttgatttgtttgatgcaaaacaccacggtaattatgcgttatactcattaaacaaagacttagccaagtagtttttgattttgtattataggagattttttcaagatgaagaaaactaaaattgttagtactttagggccagcctcaaacgatgttgagactattactaaattagctgaagcaggtgcaaacgtattccgtttcaacttctcacacggtgaccacgaagaacaccgtgcacgtatgaacatggttcgtgaggttgaaaagaagactggtaaacttcttggcattgctcttgatactaagggtgccgaaattagaactactgaacaagaaggcggcaagttcactattaacactggtgacactatccgtatttctatggacgacactaagaagggtaacaaggacatgatccacgttacctacgatggtctttacgacgatactcacgttggtggtcacgtattaatcgatgatggtttagttgaccttttgattaaggacaaagatgacgctaagagagaattagtttgtgaagctcaaaacactggtgtaatcggttctaagaagggtgttaacgctcctggcgttgaaatccgcctcccaggtattactgaaaaagatactaacgatattaagttcggtttgaaggaaggtatcaacttcatctttgcttcattcgttcgtaaagcacaagatgttcttgacattcgtcaattgcttgaagaagcacattgtgaatacgtaaagatcttccctaagattgaatcacaagaaggtattgacaacatcgacgaaatcttaaaggtttctgatggtttaatggttgctcgtggtgacatgggtgttgaaattccatttatcaatgttccatttgtacaaaaagaattgatcaagagatgtaacgctttaggtaagccagttattactgctactcaaatgcttgactcaatgcaagaaaacccacgtcctactcgtgccgaagttactgacgttgccaacgctgttcttgatggtactgacgcaactatgctttcaggtgaatctgcaaacggtctttacccagttaaagctgttaaggctatggctgaaatcgacatgcgtactgaaaagcaacttgctaagcgtaacaagttagctcttcaaagattcgaagaatacaagggttcaaacgttactgaagctatcggtgaatcagttgttagaactgctgaagaattgggcgttaagactattattgctgcaactgaatctggttacactgcacgtatgatttctaagtaccgtccaaacgcagacattattgctatgactttcaacgacaagattcaacactcattaggtgttgtttggggtgtaaagccaatgttgactgaaaagcctaagtctactgaagaaatgtttgaaaaggcagctgaacttgctaaagaaactggtcttgcaaaagacggtgacttagtaattatcgttgctggtgttcctttgggcgaaactggtactactaacttgatgaagttacaattaatcggtacccaacttgttaaaggtttaggtgttggtgaacaatcagttattggtaaagctgtagttgcaacttctgctgaagaagctaacagcaaagttcaagatggtgacatcttagttgctaagactactgataaggattacttaccagcaatcaagaaggcttcaggtatggtagttgaagcttctggtttaactagccatgcagctgttgttggtctttcacttggtatcccagttatcgttggtgctactgatgcagtagaaaagatcaaggatggttctaagattactgttgatgctcgtcgcggtgctgtttaccaaggcgaagcaactaacctttaatctgaattaaatagcttattaaaatagtcagcgaaagctggctattttatttttgtctttttttccttatactataagatgatagacaaaataaaaggattgaggcgctattatgttaggtgaaataagaaaaggaaaagttactgatgaaaatgaatctgctttttatgtgcaggttgaaggggtaacttttgaattaaagaaaatagaaattacacaagatgaaccaatccatttaggtgatgaagtacaaggctttatttatgaaaataaggataaaaagaaagaaatgacacaattttatccttttgctcaaaaagaccagtatggttgggcaactgtaacagaagtgcgccgtgacttaggtgttttcttagatattggtttaaatgataaagatgttgttgtatctttagatgatcttccacttgaaaaggatcaatggccaaagaaagacgatcgcttattagtacgtcttgaaactgatgaaaaagagcgtatttgggctaaaatggctgaagaaaacgtctttgagcaattagctgctaatttcccagcacatttagagaataaaaatatgtccggaactgtttatagaaattatgaagtaggttcctttgtaattactgatcagtactacttatcctttgttcataagtctgaaatgtttcgtccattacgactaggtcaaaagattaagggacgtgtaattggagttagtcaatatggtagattgaacttaagtgttcttcctcgtggatttgaagaaattgacgatgacgcacaaatgatcttagtaagtttacgtcgtgaagctacaaaaactctaccattttacgataagagtgatgcccaagagattaaaaatcactttggtatttctaaatcggcttttaaacgtgcattgggacatttattaaaggatgggttaattactgaagataaagatgcaggaacaattagcttggtagaaaaagatgactcagacacagataatgaaggataatttagaagattatttacgatttagtcaagtagaacgtggcttaagtcccaatacgattgtttcttaccgaactgatttagaagaatatttaagttatttagaagatcagaatgaaacaagttgggaagttgattatctagtagttgatgcttttcttgcaacacaaaaagataagggaaaagccacaacttcaatcagcagaatgatctctagcttacgaaaattttatcaatggcttttgcggcaagatataattgaacgtgatcctttagttaaaattgattcacctaaaagcgaacgtagattgccgacagctcttagtgaggaagaagttactaaattgttggatgctcctgatactaatactcgtttggggattagagatcgagctatgcttgaagtgctctatgcaactggaatgcgggttagtgagttaattaatttacgtactggcgatattcacagtgagttaaaaattattagagttcttggtaaaggatcaaaagaacgtcttgttccgattaccgaagttgctttatcatggttagagaaatatcaaaaagatgtccgagagaatcaagtcttaaaaagcggtcaatttactgatgtgattttcctaaataatcatggtcatcaattgacgagacaagctgtttggcaaaagataaaaaaatattgtcaacttatcggaataaccaaaaatgttacaccacatactcttagacatacttttgcgactcatttattagaaaatggggcggacttaagagtggttcaagaaatattgggccatagtgatattacaactacgcagatttatactaatctgacgcagaaacatattttggaggtttataatcaagcacatccacgtgcctaactattatgatcagcaaatataaaaaagattacgaaaaaactgtaatgggatatttatcttatctcccagattttaaaaatattaagaatctgcaagaagagatgaaactgtatactagcgattccaatcaattcgaggttcttatctatcaacaagatggtaatgctcgcggtattgttggtattcaagaagagaaagattttattattatccgctatttatctcttgatccaacaatgcgtgatgaaaaaacaaagcaattggtaatgaatgacctaaagcatctttatcctgataaaatgattactgccttacctaattgggcatctttattaaattatttaaaggaaaataaaactgatgaataatgttgatgaattaactttagatcttcctaattttacgggaccactcgatttacttttacacttaatcagatcacaaaagatagatatctatgatattccaattgcaaaaattacgggacaatatttagctaatttagctcgctggcaaactttggacttacaaattgctggagagtattttgtgatggcgtcaacattacttagaattaagtctcaatatttacttcctaaaaatgactttattgaggaagatcagtatcaagaagatccacgtactgaacttgttgagcaactagtccagtactcagtctttcaaagaattgccgaatactttaaaaaaagagatgaagaaatgccaattacagtggcaaaggatccatctgtttcccctaaaaaagagattgaaccacttcctttaggagaaattacaagtgatgagcttgcaaatacttttaaagtagttttagagcgattcaaactgagaaagccacaagttggaaaaattgaggttcacgagacttcaattgaagaaatgacaagctttttaaaaaacaggttacaaaagaaaagatcgactagtttttttgattgtattaaaagctttcaagatcttgatcaagtaattggtttattcctagcagttttagaattatgtcgtgatcataaaattttggtaaagcaaaatagagattttggtgatctagagttagagaaagttgagattaatggcaagtaaagaagcagaattagaagccttactttatgcagcgggggatgatggtttagaaactgagaatttactacagttgttagaaatttctccagctgccctaagagaattagctaatcatcttaaggaccgattgaaaaatgatgaaaattcaggtttgcagttaatttgcatcaatcaaacttataaattaaccactagtccgaaatgcggagatattatttctaaatttttccaaaaagatctatctaagaatttaagtcagtcagcgcttgaaatcctgtcgattattgcgtatcgacaaccgattactcgagttgaaattgatgacttaagaggggttaactcagcgggggctttgcaaacgttggtttggcgcggattaatcaaagtagatggaaaaaaggatgtcccaggacatcctaacttatatgtaacgaccgattattttttacagtactttaactatgaaagtttggctgatttaccggtaattgaagaatttgaagccgatgataatcctgtgaacctatttaatcaggatgatagtagaaataaagaaattaattttgatgagggtgagtaaaatggctgaaagattacaaaaagtaattgcgcaggcaggtgttgcctcaagacgtaaggctgaaaagatgattagtgcaggacaagtaactgttaatggtaaaaaagttactgaactaggaacaaaagttgaacctagcgacaagattgaagtaaatggagttccaattgaaaaagaagccctccacacatacttattttataagccacgtggcgtgatttcttcagtaagtgatgataaaggaagaaaaacagtagttgatttctttgaggatgtaccatatcgcctttatccagtagggcgtcttgattacgatacatcgggcttattactaatgacaaacgatggtgaattagcaaataagttaatgcacccacgtaacgaagtaccaaaggtttatgtagcaaagattaagggaatcctttctccagaggagattcgctctcttactcatggtgtgcgtattgatggacgaaagagtgcaccagctaagttaaagattctaaagactgatgagaaaaagaagactcaaattgttcaattgactatccatgaaggtcactaccaccaagttaagagaatgtttgaagcagtacatcactttgtagaaaaattagctcgtgaaaagtatgcctttttaactttaaagtcattaaattcgggcgagtatcgtgaattaacgaatgaagaagtctttcgtttaaatcacttagctgactaacgctttattaaaagctatgataaaataaaactaataatctataatttggaggacttttgaatgaaggaaaataaatctcaggacaataaagaaccaaaaggcccttacaagcattttgagcgtcctaaaacatctagaagggcaatgcatcatcgggagtcagaaccagaagcagagccagaagttacttctagaaaatctactcaatcagaaggcagtccaaaaggtccacatcatagtcagctctgggctggattgattattgttgcaataattatcattgcattaattccgattgtttcttcaagattacacgctaactctaataacttagctgaaaagagcgttaaggtttcaaaaagctcatcttctaagtctcacaaggctaaaagtaaaaagagtaagcacagctcttctaagaagagtaagtctaaaagtagcagtgtgagaagagaagaagaaagttcttcaagtcaatctcaagacacaacaccagctgtggttagtcagtcagaatctcaaagtagtcaggttagtcaaagtagtagtacgcaatcttatgaatctagtgctagtcaaactactactcaagatcaaagccaacaatcaactcaacactcataccaaaacaatcaaaatacttggcaaaacaatggtggaagcagttcttcagaacatgaagcaccaagatcttacactgtgcaagagggagattctttatcaaagattgcccgtgaaaataacacttcagtgcaccacttagagcaaattaatgatttagagtcagctgatagtattagtattggccaatcaataaaattaagataataaaaaacaataatgtttacaattctaccaagaagtattattatttacttgtaaaaaataaatacaaggatgttgtcttcagggcagggcgaaattcccgaccggcggttagagtccgcgagctacacatgtagttgaacctcaggtaccgatagttatagtctagatggaagaagacagactaaagaattaaacatgatttagatgattaataaggtctgttgctgaagcgacagaccttttgtatgttatggaggaactatcatgcaaagaaaaacaagtttaagtcatgtaagattagcctactggctcgcttgggcaatgattggtgcattagcatttttgattatgaagattgaagtaccaattattcctggttttgattacttaaagatggatttttctgattcattagtagctttaagtgctttggtttttggtcctttaggcgggacaatgattgccctttttaaatcattattgagcctctttatttcgggatttaatccaatttcaatgattggtcagttggctgcatttttagcaagcttagcttatatcttgccattctacttcattagtaaaaagcatgaagataaagtacaataccaaattttgggattagcagtcggaacatttgctttaacagtagtaatgtctttagcaaactacttcgttttaactccaatgtatatttctttaatgggctttaagctcaactcatcgcttttaacttacattgtttcagcgattgtgccatttaacctaattaaaggaataattaacagtattgtcgttctattattggctaagaccttattgccagttttagaaaaatttgtaagacgtaacttttaaagtctaaataataaaaataatttcatttagcaggagtcatttgacttctgttttttgttttatggtagaatttactttgaatgaaaaagaaaggactaaattatttaatgcaagtagctattgatggtcctgcatcagcggggaagagtacagttgctaaaattatcgcacataatttgggctatatttatattgatactggtgcaatgtatcgagcatgtacattaattgcacacgataataacgttgactatggggatgaaaaggcaattttgaacttgatcgaccatagtacaattgattttaagcaagaagatggagaacaaaaggtttatgtaaatggtaaggatgtatcaattgacatcagaacacctgaaattacagagaacgtttctcaagtttctgccttaagatcaattcgtgaaaagatggttgaattgcagcgcgaaatggcgggcaagcacgatgttattatggatggtcgtgatattggaacgacagttttaccagatgcagaggtaaaaattttcttaatcgctagtgttgcatcaagagctaagagacgcttcttagattttcaagaaaagggtattcatcaagacttaaaagatatcgaacatgatattgaagttagagactataaagattcgcatcgtgaaatttctccattgaaaaaagcagatgatgcaattgaattagatactacaaacttaacaattgatgaagttgtagccaaaataaccgagataattcaaaaaaagcaaaaaaattaaacaaaagtgtggaaaaaagatatcaagtactttaaaataaagtatgatattgggaggtaattatgacagataatagtaatcaattcttagatgctctaaaagaaatgcagggagttgaagtcggcaacattgttaacgttgaagttttaagtgttgaagatggacaaatcgctgttggtgttgaaaatgcaggtgttgaaggtgtaatcactaagcgtgaattcactaacgatcgtaatgcagatttgaaccaattggtaaaacctggtgataagtttgaagctttagttcttagaagagctggtggcgacaaggaaaacggtgaattcttcttctcagttactcgtttgaaggaaagagaagcttacaaggaattagaaaaggtcttcgaagaaggcaagactgttgaaggtactgtaactggtgctgttcgtggtggtttattagttgacgttggtacacgtggattcttaccagcttcattaatttctaaccgttacgtttctgacttgaagccttacattggcaagaagatgaacttgaagatcactgaaattgatcctaacaagaacagattaattctttcaagaaaagacttaatcgaacaagaacgtgaagaagctttcgaaaacgttgcttcacaattagttgtaggtgacactgttgaaggtaaagtatcacgtttaactggttttggtgcctttgttgacgttggtggtgtggacggtttagttcacatttcagaaatttcttacaagcatgttgataagccaagcgatgtattgaaggctggtcaagatgttaaggttaaagttatcggtattgatgacgatagacacagaatctccctgtcaattaagcaaactttaccatccccatttgaagaagctactgaaggcttacatgaaggcgacatcattgaaggtgaagttaagactttaacttcattcggtgcattcatcgaagtagctgatggaattcaaggcttagtacacgtttcagaaattgctaacaagcacgttgataagccaagtgatgttttaaaggttggtcaaactgttaaagttaaagttttaagtgttgacccaagtgacagaagaatctcattgtcaatcaagcaagctgatcctaatgctgctaagagtgaaaacaactcacgtccacgtcgtcgtcaagattctgtagctgataagtacatgaatgacaatgacaacggttttgctttaggtgacattattggtgatcaacttaaagataaggattaatcgtcattagtctaaaaaaagctgactccggtcagctttttttatttcattagatagaaaggggtagaaataatatgtcattacccgtagttgcattagttggacgtccaaatgttggtaagtcaactatttttaacagaattattaattctcgtgtagctattgttgaagataaggctggagttactagagatagaatttatgcccgtgctgaatggatgggtcatgaatttatcctaattgatactggtggtattactctagactctggtgaaattgaagaacaaattaaggcacaagctgaaattgccattgatgaagcagatgtaattgtgatgttaggggatgttactcaacatatgactaacatggatgaaacaattgctaaaatgctttatcgaactaagaagccagttattttagccattaataaggctgataatcctgagcaaagaacagatatttatgacttttacagcttaggattaggcgacccaatcccagtttctggtagtcatggaactggaatgggtgatttactagatgctattgttggtgaatttggggacaaggctaaccaacatgaagatggttcaattcgctttagtgtgattggacgtccaaatgtcggtaaatcttcacttgtaaatgctattttaggtgaacaacgtgtaattgtttctaatatcgaaggaacgactagagacgccattgacacgacttttaccaatgatgggcaaaagtatactatcgttgatacagccggcatcagacggcgtggtaaggtttatgagaagaccgaaaagtattctgttttaagagcgatcagtgctattgaagaaagtgatattacacttttagtcttagatgcaagtactggtattcgtgaacaagataagcacgtagcaggatatgctcatgacgcaggccgcggtgtaattattgttgtaaataagtgggatctacctaaaaaagatagtagaagtatgaaggactttgaagatacaatcagaagagagttccaatacttagactatgctccaattattttcgtttctgctaagacgggtcaaagagttccagatatcttgaagcttgttaaagaagttcatgaaaatcaaactcgtcggattcagtctagcgtcttgaatgacttgcttcttgaggcaactagaattacaccaactccacttgttaatggaaagagattgagaatctactacatgacccaagttgctgtaacgccgccaacatttgttgtctttgtaaatgatccagagttgcttcacttctcataccagagatttttaattaatcaattaagacaaaactttgattttgtgggaacaccaattaaaatcttagctagaaaacgtaaataagccttaaatttcaaaaaaatagggatatatctgcgaaaaagcttgcaactaagcgtcttagtgtgctaattttattgcagggaataaatgaataactcatttttcttattttcaaaggtttttgtttaaaaatattatttagttcattttgggaggtgaagtggaatggcaaacaaggcagaattagtttctgaagttgctgctaaaactgacttaaccaagaaagaagttgctgctgcagttgatgcaatctttaactctattcaagaagatcttgctaagggtgaaaaagttcaattgatcggtttcggtacttttgaagtacgtcaccgtgcagctcgtaagggtcgtaacccacaaactggggctgaaatcgaaatcccagcttctaaggttcctgcattcaagccaggtaaggctcttaaggatgctgttaagtaattgttcagttgctagcaaaataaaaacgtgctaagttgtatagcttggcacgttttttgtgtacaattattgtgatagcacaaatgaaaagagtgaaaaaatgacttattctgaacaactattagatgcaattcaaaatcatgatttttctgataatcgaattctcttgaaaaaggcattggataatgatgatccagaaatccttgcttctttagctgaaaacttaactgatcttggttttactgatctttctaaagaagtttatcgttttttgattggacaatttcctaaagaagacttgtttaaggtctatttagctgaaattttgttaaatgatggggatgaagacgatggcttacagctactttatgatgtaaagccagatagtgacgcttatcttgaaagtttgcttgatttagctgattactatcaaagtaatgggctaattgaaacagcccatcaaaagctcttagaagcccataaattagctcctgatgaagatgccattaactttggcttggctgaattagactaccttagtggtgattacagcgaagccttagacttataccgtgaattagctaaaaataataagacttttggtgaagtagttttaagtcaaagaattgcagcttgtcttgcaaaattgggtgagtatgaagaggcagcaaatgaaattaagagtcatgaaaatgatattttaagtattgacgctctttatgaagctggcttaattatgctttcggctaacgataataaggctgcaattaagtatttagaccaggtaattgaaacccaacctgattatgtaaatgcctatccacttcttgcgcaagcttatgccgcagaagacaataatgaggaagtgctgagaactgcgcaaactggtctatcttataatgaattggatgaagttttgtatagtttgggtgccaaagctgctgctaacttgaatcaattagatgaagcagaacgcttgcttaaaaagggacttgaggttgctcctgacaacagtgacttgcgcttgcagttgtctaacttatatcttcaccagcatcaagatgaggctaatattggcttatttaaggatcttgacgatgaagagttagagccacaagctcactggaatttggctgtttcttatcaaagacttgaggattatgataaggctaagagtgagttcttgcttgcctatccagcctttcaaaataatgcaagcttcttaagacagatgattagcttgttctatgagttgcgtgaaattccaacaactaaggaattgattaagaagtatctgcaagttcaaccagatgatcttgatatgcaagacatgttagatgaattgaataatgaaaatgaatagtaaaaaaagctggtttttgtaccagcttttttgtttggttcatattttttattatgtaaaatagtcaaaaaacatagaattaatatatctcaacagacacaattatgatatcttttaaggagagtatgtaataaagattatgtataaaagagagactttaatattttggtaaataaagaattgaaagcacccatcatatatgaaactagctataatgttcaaaccgctagtcagctaaatgataagattaatcaagaatatgcttcagatgaaaaaaagcaagtattattgacagaatttcctactgtatatgtaataaatgatcctatgaataaaaataactcacaatatgcagtatatgttggtgaaacaaatgatattcaaaggcgtacattgcaacacttggattcagatcccgctaaaagagacgatttttttcatttaaagaattcaaaaaatgtaagtatgtttgtaattggacacgaacactttaataaatctatgactcttgatattgaaaatagaatgatgcaatatcttagcagtgtaccggcagtatatcgtctaaataatagacgtcataatgagcaaaatagatattatgattctgatgaatttgatgatttatttaatctcatttggaaaaaattaggaaagaaaaaccaaattttgtttccagctcgtaaaataattgaatcatcagctatttttaaggcatctccgtttaataaactgaccaatgaacaattaaatgcgaaggcaaaaattatagataatataaatgaagaactctttaaacagaaaaatcaaaaattggatgaaggggcgcttattttggtcgaaggtaatgctggatcaggtaaaactgttttgatgagtaatattttttacgatctagtgcatgaagatcagatatcggctaatgagcaaaaaattgatgacaattctcaaagattatctgttgcaatgatagttaatcaagatgaacaactcaaggtatataaagaaatatcgaaaaaactttttgataaggatgatcaagtacaagttgcaaagcctgctacttttataaagcaagttgatcctgagaataagatagacatcgccttgattgatgaagcacatttattacttacacagaaaaaccaagcctatgccaaatatggcaataatatgttaaaagatattatgaaacgtgccaaagtaattatggcagtatatgatccgggacaggttttatctacggcttcagtttgggaaaagaaagactttgctgaattagaagaaaaagcaggaaaaaataatattatctatttgagcaatcagatgagaattgatgcatcccaggcgacaatagattggattcgaaatgtaatagataatggtgtgattaataaagtacctcaagatgataattaccaaataaaggtttttaaagatccatctgaaatgcaaaaagctattcaagaaaagaatagtgatcaaaaaaatggaataagtagaatggttgctacatttgactgggactattctggcggaaagacacagccacctgataatcaaagatactgggaagtctctgaagggaaatggcatatgccatggaattatgaaataaatagaagagacaagtatgaaagtaagcatagagcgcataaatctgtaaagtatagtgagcagtcatgggctgaaaaagattacacaatagatgagatcggatctacttatacggtgcaaggatttgatcttaattatgtgggtgtggaattaggtccatctgtaaaatatcgaaatggacatattattcatgatccactagagagttccaatagtaaagctactcagaaacgtgattctactaaaagttatgcagacactctgctaaaaaatgaatttaatgtgttaatgacgcgtggagttcatggactatacattcatgcagttgatccagagttacaaaaagcattagaagaggctagtaagtaaaaaatgaaatggagtatttatggataaagagtttgaaaacctagtttcaaccaaaataaattcatctgcagaatataataattttattgatgtactcgcttcgaccaaagaagataatgcacttgtgtgttttcttggagctggaacatctatttctcagggatataaagattggaatgggtatgttcaagatcttatccagtattggaagacccatttacaagatttattaggacaaaattcattttattcatcagtacaggcaactgatattagctttttagactggctaaatgatagaagtggctattctaataaaagaaaagttgatatggttcatcatatgatcaaaaagtattgtaagagtaaatccatggctcagaatgatgaagagaaaactaaatatttagaacatgtaaacgattttgaaaaatattattttcttgaaataaatccaataaaaaagatcaatgagataattgatcaagttcttaatttgagtgcgatttttattactacgaattatgataatcaaatagaaaaagcatatgaagcgacatttcaatcacgtccaaatattctaaaagacatcaatgctttggaaaatattgacaaattagctgataaatctattttacatatgcatggaacacctgttactcctggagttttattagttagttcatctgattcatataatcaattatatttgaataataataatgctaagaaaaaaatagaaacgcaattgataaaacaaaatgcacatgtgctattatttattggttcaagtcttcaagaagaagaggttttaaatctcttttcatcagatagtttaaatttaaaaaagtatgcgttgatgcaacttagggatgatatttctgaagatcaggctaatttagtgaaagagtactatagagaagagaaaaatatagaaattatatggtatgggcataactattctgatttaccaattttcttgcaaaaaatgaataaagatattagcgataagtatcaggaaaagcatgcatttgtttctgccaaggagcttattgacgacatagataaaataatttggatcaattaaataaagacataactagagctttgttcaatgaggaaacttttatagatgattgctttagaaataggttaaataaagatagtattaatttgctcgtcaataatagtaaatttgtaaacgaattaaataagggaaagtattatcacaatttttggagtgaagtaaatagaaaattttcaaaactaaacgagaaaactagattcaaaataataaaaattatagaaaaatcatctgaattttttggtgatgaaaatacaatgaatattttgtataaatatcgtaatgattttgattatttatatgaaaatggtaagaaatttttaaatcgagtatattatccaatcaatatctcaagtaatgaagctcgagtaatttggttattggtcaacttagaagagaatagtattttttatacttttgataatttagttgaatatgaattaaatgagaatatactttttaacttttcttctgcagctttgaaaaagttaatagaaattttgaacaagaaaaaaatgttattacagacatcaattgaacagattttagagaacgaaccaattaaagtactcgagtatttgtttatgaaaaatcggattgtgtataaatctggtgcctttccaaagtatttctatagagatagtaaattgattcaaaggttattgataaatcttagtttaagcgataattttccaaaagtatttgattttgaccaattattaaataatatagattttaatgataaattaatgggcaaggaaatgaacaaatttgttcaaaagtttgcaaaagataggaacataaaatcgaattattatattgatggttggtatacttttgatatgactttaacgccagatagaccgttttttgaagtgcaacaacctactgatcaaagagatgtaaaaaagattattaaaaatttgaaagaggcattaaatttaaaatctaaacaagatgataaaaatataattgggcaaaaagaacaattactcaaagttttaaaaaatagtgagagttggaaaaattttagtcacattaataactattttttagaagaagcaatcagtgatgatacgatattaagaaactatttgaatgagataaataaaatcctgattgctggtgcagagactaataagttagaatttgacatagttaaacaatattttaaccgctttaatttttgtttagaatcagtgttatctggtaataattttgaatttttaaaatatatatctataaatggcactcttaaacaaaagaaaatattatacgattacttattcaatgattttaaacttaaaaattctgatttttactataataaggaaaataaaactaaatggatatctttagaagactttgtaaatactgtagcatatcaatacgtatcattagttgatgatatgataaaaaatgataggggttactttgaaaaaaattataaaagtaaatttaaagatactattttaaggttatctaagcatgaacgagaatatatgaaaggtcgtttttatattttctttgaaaaagataatcctattacagaagatgaatttattggcttttctcatagttatcgaattaatgaaaatatagcaaatagggctacaaacgcagtaactcgactgcttaacacagaattttcagatgagttttgtaaacaaaacatcattttaacactaatatattgtataaagcccatgcaagctaacataaagaaaccaattaaagctgaatcatataagaatcttttatttagttctatgattaattattttttaaaacaagaacaggaattggaagaaaaaaataatgtattagattggattaggtggtatttaagaaatatacctgatgcattaaaaattgtattaaatgcaatctctagaaatataaataatacttctgcttgtgagctcatctttaaagaaatactgcaaaatagaaaatatattaataaaaaatatgagatgtcgtatatctattttagagaagataggagttattcaaaagacagtctaagattaatggctaaagtaattgaaggtctttttataaatgggttattagtcattagtcattctttgacttttaattgttccgaagtagttaaaaaaatggctgaaaataattaccaagacttaatcaaagattttttagaggtgactaagcaatttctcttgccagaagatcaaaaggaattagaagtaaaatatttacgaaattaataaaaggcaataataatcaacaacttttgatgatatgaatatggtattaaatagtcagatcattgataagttgttttaggctaaagtactttgaatgataaagctaatgaatttgaaaaaatagtaatatttgtaaattagtgaaaaaagtagaattgcagcagataagattgtggagaaattataattttcggttgaaaacgggcgattagctaatcgcccgttttttgatataattgcagttatataacaaaaaatataagaagtaatttaaatgattgaggatggtaatgaaaaaaatagttagaggagtagccgtaatttcatctttattatgtttgattaattttgcacctagtcaaatagcttttgctgatgaaaatagtgatcagcaaattgaaaagaaagaagtaactacccaaactttatattgggaatgtattaatcaagatactggggagcttttaaaaacaatcaaagttgatactgttaaagttgttaatggtgtgccagagcgacaattttttcatatgggacgattaccagagaaaattggcaatcttgaaatagcaggtaatccatggggcggacgtgatttagaagtcgatcctaataataaaagaggtgctgtttatcttaaggctggatattatgatgcagaagcatatgaagaacgttcaaaaaataattttggatggggtgatccaaaacaacaaggtattattaatacgactttgatggaatataaggcttaccatggaacaagtgatggttatatagctccaggatactatgatgataataacgaatttcatgggatgatgacggtagatgaatggtgtaagaaaaatcatatgcctagagaaagaaaaataaatcctaaaaaccagtcttctgaagacaaggaagatacagaagatcaaagcatagataatgtaagtgatccggaagatcaagaacaagctgtgtctactaatagatcaaaaaaatcaaaggactctaacaagaaaaatactaacgaaagaaaaagatcatctagtcaaaataaagttgaaaatactcatagtagtgttttccatagtagcttgttttacttgggtattgtagtaataggtatagtggttgggatattttttatccctaagaaattttggagaaaaatttttggtggaaagggtcgtcattcaaaataattcttctttaataggtcaaaaaagctgatttttaaagatcagctttttaatttatttcatattttaaattatgttaagcatgctccccagcatttctactgaacttgttgtaaaatatttactcgtgaggaaagatgctacagttaaaattgataacaaggaattattcattgtaataaaaaatgatgtcgaaaaaagaaaaaatatatcacttcagcatggcaattctagccgtgatttcaattatactagtaattttagattatgtttcagtgattaatctaacaaacggcatatggatgtggatcgatgatagtattctgcttatttttgctattgattacttctaccggctgtatagggcagacaacagggggagtttcgtcaagcataatattttcgatcttttatcaattattccagtcaatggattattcgcatttttcagaattgcgcgtattggaagagttgctagaattacaagacttcttagagttctgcgcctagttggtttaaccggcagactccggaaaattctgtatactaacgggctagtttatttgttatatacaagtcttagtttattaatcattggagcgatcacttattcaattactgagcatgtttcattagcgcaggctttttggtgggcgattgcgactgcaaccactgttgggtatggggacatttcaccgcatacttttgttggaaaaatagttgctctagtcttaatgctagtagggatcggcgtgatcggaactttgactagttcaattacgacctactttattagagaagatagtaaaaatgccgataaaaaagatgaccaattagaaaaaattatccaaaagctaaatgatattgaaaagcagaatcaagaactaaaaacagaaatccaagaattaaaacaaaaagcggacgaaaagtaattaatcgcacacaaaacggttgaaaaaacggtcgattagctaatcgaccgttttttgatgatacgaataatttttagatcctatcttctaaagaaaatatgtctcttttttctttcataagtaaaaccttgacctagggcttcatgaacatcgataactgaaacaaaggcattaggatcttcacgcaagattaattctttaacctgactaatttcccgcggtgaaattacacagtaaataatttttttagctgatcgatcaaatccgccttctgcatttatgaaggtatatcctcgatctagctgaacatcaatcattttagcgatctgttcatatttatcagaaataataaacaatccccgtgcagcataggaaccagcttgaatagaatcagtaattctcgctaaaacaaaactagctagcaaagtataaatcatatgcttaatatcaagataactaagagaaatcgttaagacaaatgcatcaagagctagcaaagattttccaactggaatacctaattttaaatctaagattctggcaataatatctgttccacccgtggttccgccgtatttaaatacaataccgattccaacaccagaaaacaaacctgctagtacaccagcaataaaaagatcatggtctaaatttaattggtttataataggaagatgaagccaaaaggataagaagaaggatagacaaagtgtgccccagattgtcaaggcaaggagccgtttgcccataaagcgatatccgattataattagggggatatttagaagtaacgtggataaacctggattgatgtggaaccaataccgaagtaaaagggcaataccactaatcccgccatcggcaagtttgttagggatgctgatggcatctaggctaaaagcatatatgctgcagcctagagtaatgaagaagatttgtttaaagagttgtttattgaataatttagtcatgttacttccttctttctattattaagaagtgtgaaaattaaggggaatagggaatatatgaagattaataatttaccggaagtttttactgccgcgcttccagttttaaaagagattaatgaggcggggtatgaggcctattttgtcggcgggagtgtgcgagacttgcttttaaatcggcacattcatgatgtcgatattgcaactagcgcctatccaatggaaattaagcaaatttttaagaaaacaattgataccggaattaagcatggaaccgtcactgttctttatgagggtgaaagctatgaaattacaactttcagaactgaatcaggctaccaagatttccgtagacccgaccatgtaacttttgtccaaaacctatcagaagatttaaagcggcgtgattttactattaatgccttagcaatggacgtagatggaaatattattgatcattttgacggattaggtgacttagaaaagcatttgatccgtgcagttggaaaagctgagaatcgttttcatgaagatgccttgagaatgatgcgtgcagttcgatttatgagtcaattgcaatttacgcttgaaccagaaacagaacaggcaatcagtgacaatcatgagttactaagtaaaatttctgttgaacgtatcagagatgaattcgtaaaaatggggattgctcctggcagccaaaaggcattccaaatctttttagatactggtttatcagaagaagtacctggttttaggggtaaaaaagagaatttagctctttatcctcaacttaattttagccctactactgaagctaatctatgggctttgatgattattttattaaaattaccaaatgacaagattcctcactttatgcggatgtggaagaattctaacgcaatggagcgtcaagtagctgatattgttgctttctttgacttaattagctcacacgctccaaataattatgatttgtataaagctggtctagaaacaattgtttcaacaattgatttagctcatattttgggccaaccagtcaatgggagtgccttagttgatagttacgaagcattgccaattaagaataatcgtgacctagtgatagatggccactttttattgaaaaatggtattccagctggaccaagagttgggcttttattagaagaaattaaaaaagccgttttagagggagtaattagtaataacgaggcagcgattactgaatttatttctttaaatcattaactaaaaaaagcaggcagtgataatgaaaattcactgtctgcttcttttttaaacataaaacaaaattgaaaaatacatcagaattgaacctaataaaacaaacatatgccaaatcacatgaatgtaaggaacgccgcgcattgaaaataaaatggcaccgacggtataggcaattccgccccagactaagagccaaaatccagttggccccagaactgggtaaagggtactggaagcaataatcacaatccagcccattaacacgtaaaggatagtatctaaaacaacatgttttccctgattaaagatgtaaaataaaatgccaaaaatggccagggctaaaatgataccaaacattacccatccctttacgccgccaattgcgactaaggtataaggcgtgtaggttccagtaattaaaataaaaattgaagagtgatcgaatatttgaaatactcgcctagctcgggtaaaaatcaaactatgatagagtgttgaaaaaagataaaggataaccaaactagaaccataaagagtaaaagctgtcaccctcagggcacttcctgtatgggcagctttcacaattaaaactaccaatcctgcaacagctagcccaaagccaattccatgagtgatggcactaaaaatattgtttagaatgttataggttttagatcgattctttggttcttgccacaattgtttaaaagacattcatttattccgccttatataataactttataatctatttaataaattttaactcatttttgtatttttgatatacttgagattgtacttaataaattctaacatagaataataattatagaagaataggggatagcacttagaatggctaagattaaagtagtaactgattcctcagttcaattaactcctgaagaaattgataaatacgatattacagtcgttccattaactattactatcgatggtaagacttacacagatggcattgatatcagtcgagaagaatttgtgaagaagatggatgagtctgaagaattaccgaagacaagtcaaccatcaattggaattttcgaaaaagtatttacagaattaactgccgatggaagccaagcagtaggaatttttcttgctcgttctttaagcggaacaattgaagctgctagacaggctgctgacataattggaaagactaaagaagtaactttaattgattctgaactaactgatcgtgcagaagcttatcaagtgctggccgctgctaaggatgcgcaagcaggcaagagtcttgaagaaattgtaaatcatgttgaagaccttaaaaagaagcaaaaattacagatgatggtagttaacctaaataacttgattaaaggtggacgtcttggcccattagctggtaaaattgctactttactaaacattagaattgaattgcatatgccaggtggaaatttagacgttgctaaaaaaggtcggggaaagaagttttctaagaactttgataaacgtgttttaaaggacattgaagaacataagcacgatatcaaagaagtagcaatttcttatgtcgatacgcctgaagatatggaagtttggactaataaaattaaagaaattaatcctgatattaaagtgttaactcgtgttactagtccaattattgcaactcatgctggtagtggtgcctatgcagtattctatacaacggaggacttttaatggcttatcgtgagagcttttatcgttttttaatgactcaaagaaatcctgattctttagatgatattgctgaatttgctaataacgcacaacatgacagctcttttccaaaacaagaggaagactatgaaaaattgtcagaatatttagaattaaatgctggttatttaccaagcatgagcgtttttgacaaggcatatcaattatatttagataatatgaactgaggctaatatggcagaagtagaaccaaataattctcatcaaaataaagaaatttcaaataataaaaagaagcatcttcccaaatatgctcaatttttgttaactggtatagctggtgcggcaattggtgcaggtttgacctttggaattatggaagttaaggaactaaagtcacctttttatcaagttgaaaaagtgtatgagcaattacaaggttcatattataaaaaagtctcaccgcaaacattgcgccagggggcaattaacgggatgcttaatagtcttaacgatcctttttctgagggattaagtggagcaaaccaagaacaagttaataatattttagagggttcgagttttggcggagtaggtattcagatggcagtacgcaacaataaagttgttgtggactctattgttgctgactctccagcttcaaaaagtactattaaacctggcgatgagattgttgccgttaataataaaaaagtaagtgcagctcagtttagtaaagtagctcctttagtcagaggaaaaattggtacaaaagtcaccttgaaacttagacgtgctaactctacttttaacgttaccttaaagcgggctaaaatctcccaatctagcttaactaagcgaactgaaggtaatgcaacaattattacaattacacaatttgacgttaatacggctaaagatttaaagagtgctttaaagtcaattgatactaaaaaatatcctaagttaattattgacttgcaagataatcctggtggtgcaatggatgctgctttgaagtctgcatcgtatttcttgccaaataataaaattattatgcaatatcaggatcgcaagcaaaaagaagttattcgctctgataaaaagctttctggtggcttccatacaaacctaaagccaattattttgattaatgctaatacagccagtgccagtgaaatctttaccgcagctcttgttcaaaatcaccgggcagtttctgttggtcaaacgagctatggtaagggaacagtgcaagaagtagggcagacgcaagattcagaatataaatatacaattgctaagtggcttacacccgatggaacttggattaaccaaaaagggttaaagccaacttatcctgttcctgaatcttctttagctaaactacctcaattccaaagcatgagtattctgaagaaatcaatgactggtgttgatgtggcaactctgcagcaatatttgactgccttaggctatatgccaaagcatgttacaggagtttttaatgatgaaactaagaatgcagttattgagtttcaaaaagcccatggcttgacagcagatggtatagtaaatgggcaagtacaagcgcaactttatttagcggttgcacaaaaactgcaagatgataatcccgctttaaagaaggcaatgagtttaaatctaaaggaaatggaggattaaaaatggcaactattcaatggtatccaggacatatgaataaggctaaaaatcagctagaagataatctagacttgattgatgtcttaattgaagttttagatgcgcgtttaccagtttcttctcgtaatccaatgattggacaattaacaaagaagaaaccgcatattattgttttaaataaggctgatttggctgatccaattcaaactaaaaaatggactcattattatcaagatgagggtaacttcgtgatttcgatggatgcccagcatactacaaacatgactagtctatttaaaattatcaagttggctggtaaggaaaagacagataaattaattgcaaaaggtgcatcaaatccaatgattcgagtagctattgcaggaattccaaactgtggtaaatctactattattaatcgtatggttggaagaaatgctgcaattgttggtgataagcctggtgtaacacgtggacaaagttggttaaagacaaagactaatgttcagattttagatacaccagggattttgtggcctaagttttctgatcaagaagtaggttacaaattagcagcttgcggggcaattaaggcggatatttttcatcccgatgatgttgccttatttgtgattgaatttttgaagcaaaattatcgcgatgatcttgttaaatttgcacgaatttcaagtgaagagatggacagtatgtctaatccagatttattgttagcaatgaccaataaatacggtatgcgagatgactatgataagttttcactctttatgcttcaacgtttacgcaagggaaaattgggaaggattacgttcgatcttagatgacgattactgagataaagaacttacttcaaggagaagtaagcaaagagcaattagaagaattaaaagctgatgaacgaaagggcgtccaaaagctcttaattagctatgaaaaaagacaagctaaatatgctaaagcattagctcaatttcaatctcgtttttcttatgaaaaagaattttggcaaaaagatcaacttgttgctggggttgatgaagtagggcgtggaccgcttgctgggcctgtagttacagctgcagttattttgccacatgattttgatttaattgatgttaatgactcaaaaaaattatcacctaagaagcggcaggcgctttttccaaagattctagaaaaagctgtcagtgttagtgtcggcttagctaataatgatgtaattgatcagattaatatttatgaagcggatcgtttagcgatggctcatgctgttcaaggtctaaaagtaaagccggatgccttattagttgatgcgatgaatgtacctttaaacattcctcaagttaaattaattcatggggatgctaagtctaactcaattgctgccgctagtattgtagctaaggtgtttcgggataacttaatggatgcttatggtgagctctatccagaatatgattttaaacataatgcaggctacggaacccgtgagcacatggaggctctagaaaaatacggtccaaccccgattcatcggagatcttttgctccagttagtgaatacgaaaaataattaaaaaataaaccttcacttttgcgtacatgatagtggaggttttatttatatgaatttgaaagaattttgtttaaggttaaaattacagcaaggtcttggcattactactataggaaaaattgtagcgaattttactgctggtgaagaagtaacagttgacaaaatagagagtttatcattaaaatcaaatatccaaaatcttgttttagctgcaatgaaaaatgataagtttaattcttggattgaaagaattgaattacagtgtgatgttatcactatttttgatacaatctatccaaatgcactccgtgaaatgtataatgcaccaacacttctttttactagaggagatttatccttgcttaaaaaggagattacagttatagttggcgcaagacagccgacaaattatagtcgttttgtcttaaaacaattaattccgcagctgctacagcaagattttgttattgctagtggcttagcacgcggagtggatggaattgctcatcaagaaacattaaaaaatcacggtaagacaattgccgtcattggaaatggactcaaccatttttatccgcaagaaaacaaaatgctccaggaagaaattatggcgaagggactattgatcagtgaatatttaccggatactccgccaagaccttatagatttcctgagcgcaatagaatacttgcgggcttaagcaaaaatattattgtgactgaagctagaaaaagatcgggcgccttaattactgcaaatattgctttagaagaaaatcgcaatatttttgcagttccgggaccagtctcaagtcccttgtcagaaggccctaatgagttaattgccgctggtgcttatccattggttaatgctgattttaaaaatttgctttagttgacaagagtaaaatttttggtattttagaatttggtagaaattgtgcaaggaaggggcattctatgcctactaaacgaaaaaataaaaagaatttagttattgtcgagtctcctcataaggctaagacaattgaaaaatatttaggaagaaattatcatgttatcgcttcaaaaggccatattcgtgatttacccaagtctcaaatgggagtggatgtagaacatgactatgaaccaaaatatatctccattcgtggaaaaggcgatacgattaaagaattaaagagcgaagctaaaaaagcaaaatatgtttatcttgcttccgacccggatcgagaaggagaagcgattgcttggcacgttgctcatgcattaaatctagatccaaaagaacataaccgcgttgcttttaacgaaattactaaagatgctgttaagaatgcctttaagaatccaagaactattgatatggatattgttgatgctcaacaggcgcgtcgtgtcctagaccgtttggttggttattcaattagtccgattttgtggcaaaaggtaaagaaaggtttgtcagctggacgtgttcaatcgattgccttgaagttagtaattgatcgtgaaaatgaaatcaagaactttaagccagaagagtactggactattgatgctgattttgaaaagggctcagaaaagtttaagggtgctttttatggcattaaaggcaaaaagcaagagttgccaaataacgaagcagttcaagatgttttaaagcgaattgataagcggaaaaactttgaaattacaaaagtagttaaaaaggaaagaagacgtcaacctgctgctccttttactacttcaactatgcaacaagaagcaaacaagcgcttaggctacagaactcgtcgaacaatgagaattgcccaatctctttatgaaggtgtgaaccttggtaagggatctgtcggcttgattacttatatgcgtactgactcaaagcgtattgctaatgtagcaaagcatgaagcttcaaaatttattcatgaagaatacggtgaaaattacgcagcagttaagccgcaacattttaaaaatgatgcggatgctcaagatgcccacgaagcaattcgtcctacttcagcttttagaactccagcttctgtgaaagagtatttaacaactgaagaatatcgactatatactttaatttggtcaagatttattgctagtcaaatgactccagctgtttacgatacagttagagctgatattgagcaaaatgatgtaacctttagaacaactggctcaaaacttaaatttgctggatttacgaaggtatacgataaccaaaaagaaaagagtaatgaacttcctgagttgaacgagggcgacaaggttaaacttaagaagactgatgatcgtcaacactttactcaaccacctgcacgttatacagaagctagtttagttcgtactcttgaagaaaatggtgttggtcgtccatcaacttatgcaccaacaattgataccattcaaaagcgttactacgtaaaacttgaaggtagatcaattgtacctacagaattaggtgaaatcgtagataagttaatcgaagagtttttccctgacattgttaatgtcgactttacagctcaacttgaaaatgacctagacggggttgaagtagggaagaagaactggattaaagtagttgatgaatactacaagccattttctaaagaattagataaagccgatcaacaaattgaaaaggttcaaattaaagatgaacctgcaggctttaactgtgatatttgtggagctccaatggttatcaaaatgggacgctatggtaagttctatgcttgctcacgcttcccagattgtcgtaatactaaaccaatcgttaagaagattggcgtaacttgtcctaagtgtggtaagggcgaagttattgaaaagaaatcaaaacgcaaccgtaaattctatggctgttcacgctatccagattgtgattttgtttcatgggatcaaccaattggtcgtaattgtccaaatgatggtcacttcttagttcaaaagaagaacaagaaaggactagtaatcctttgtccaaatggtgattaccgtgaagaaccagaagaaaattaaattataataaaaatcaatgatatcattaaaacgaaagcggtttaatgatatcatttttatatagacttgaaagagtcgagcagaaaggaaagattgcatggtaaagaatgtaaccgtaattggcggaggtcttgcagggagtgaagctgcatggcaattagctaagcgtggcattgaagtagatttatatgaaatgcgacctaagaaaaatacgcctgctcatgaaactgcaaactttgcagaattagtatgtactaactcaatgagatctaaccaactgtcaaatgctgttggtttattaaaagaagaaatgcggcagctggattccttaattatgaaagcagctgatgaaactgcagtacctgctggtggagccttggctgttgacagagataagtttagtgcagttgtaactaaaactttgaaggacttgccaaatgttcatgttcatgaggaagaaatcactgagattccaaaagatggtatcacgatcattgcgactggtccattaacctcagatacactcgcagaacaaattaaggagttttgtggtactgactcacttcatttctttgatgcggctgctccaattgtggcagctagttccattaatcgtgatattgtttataaaaaatcacgttatgacaagggtgaagctgcatatttgaattgtccaatgactaaagaagagttttacaatttctacaaaaacttagttggggccgagacagctaccttacatggctttgaagataagaatgtttttgaaggatgtatgccaattgaagtaatggccaaaagaggagaaaagacaatgctctttggcccacttaagccagttggtttagaagatcctaagaccggaaaaactccttatgcagttgtgcaattgcgtcaagataatgcagctagcacaatgtataacatcgttggtttccaaactcatttaaaatatggtgagcaaaagagagtcttttcaatgattccaggtcttgaaaatgcaaaatttgttcgctatggtaaaatgcaccgcaatacctatattgctagtcctgaagttttgaatgcaaattatgaagctagaaagcaaactggtctcttctttgctggacaaatgactggagtagaaggttatgttgaaagtgcaggttctggtttagttgccggaattaatgcggctagagaagctttaggagaagaaacactattctttcctaagtcaactgctttgggttctatggccaactacatcacaaccactagcgcaaagcatttccaaccaatgaatgcttcatatgctctcttgccaaaattagattacaaggtaagaaacaagcaagaaagacacttagaaatttcaaagcgagcattgaaagatcttgaagcctttaaggaagagaagaagcttgattaataatgtctaaagaaaatgataaattaatcaaacaatttcaagattacttgaactatgaacgtaattatagtaaaaatactgtaaactcttacttaaacgacctaaatgaagctaaggaattttttaaagaaaatggaggatttagcggctgggatcaagtcaaaagtcgcgatgttgaaattttcttacaaaacttagcgactcaaaataggtcaagaactactcaagcgcgtaaaatgtctagtttaagatctttttatcgctttcttgttaagcgggaagtgctagataatgatccaatgcagacaattagtttaagattaggcgaaaagaaattaccacaatttttctatgaaaaagaaatgcggcaagtctttgacagtcttgctggtcatgaaaagttggtagtaagaaatcgtgcgatgtttgaacttttttatgcgactgggatgcgtttaagtgagatggcatctttaaagctagatcagattgattttgatttaaagattatcttagttcatgggaagggtaataaagaccgctatgttccttttggaaaagatgcggccaatgctttaaaagaatattgtgatgaaggtcgaccagctctactaggtaaaaatgaagatcgaggctatgtatttttaaataaccggggacaaaagttaacaggccgcggaattgaatacattatgcagcaagtttttattaaagctggagttggtggaaaggttcacccccatatgcttagacactcttttgcaactgaaatgcttaataatggagcagacctaaggagtgtgcaagagcttttaggccatgaatctttgtcaacgacgcaaatctatacccatgtcacaatgaagcatttacaagcagattatcaaaaatttttcccaagaaaagataagaaagacgaggcataataatatgacaacaatttgttctgttagatataacaataaaacagccatcgctggagatggtcaagttaccttaggtgaaaaagttattgctaaggcaactgctaaaaagattagaagaatttatcatgatcaagtagtaatcggctttgctggcggtgttgcagatgcagttagcttgcaagatatgcttgaaggaaagcttgaaacttattcaggtgacttacgtagagctgccgttgaaatggctcaaagctggcgtaaagatccaactttagctaaattacaagctatggtaattgcttttaatgataaagacttattattaatttctggtaatggtgaagtacttgaaccagatgaagacgtggtggctattggttctggtggtaactttgcccaagcagctgcaattgctatgactcgccacagtaatgggatgagcgcaagtgaaattgctaaagaagctgttaagattgcttccggaattgatgtgtttacagatgaccacattactactgatgaaatctaggtgaaatattttgactgaagaaaaaactccaaaacaaattgtagaattacttgataaatatattattggccaaaacgaagctaaaaagtctgttgctgttgcattgtataaccgttatcgtagattgcaactaccaaaacaaatgcaacaagatattacgccaaaaaacatgttaatggcaggtcctaccggtgtaggtaagacagaaattgcacgtcgacttgctaaaattgttgatgcaccttttgtaaaggttgaagcaactaagtttactgaggttggttatgttggacgtgatgttgaatcaatggtccgtgacttagttgaagaagcagttcgaatggaagaaaaagatcaatttgaacatgttaaaatgcaagctactaagaaagctaataatcgtctagttaagttaattgtgcccggaattaaacgtgaaaaccgtgaaaattctatgcaacaaatgatgcagatgctttctggtaacttcaacatgaatcaacctcaagataatgaagaagtaactgatgctattcgtaatgaacgtcttagcgtagctgatcaacttaataagggattacttgagaatcgtgaagttaccatcgaagtagaacaagctccaaaggtaaacccaatgggcgatatgatgggccaaatgggaattgacatgtcaagtttgatgggcgacttaatgcctaagaagactgttaagcgtacgctaaaagtatcagatgcacgtgaagttttaattcaagaagaatcaaagaagttaattaactacgattctctctaccaacgtgcaattgagcgtactcaacaaaatggtattatctttatcgacgaaattgataagatcactgctggtaacaagaagacctctggtgaagtttctcgtgaaggtgtacaaagagatatcttaccaattgttgaaggttcaactgtttcaactaagtatggtccggtatctactgaccacatcctatttattgctgctggtgcttttgccgaaagtaagccaagcgatttaattccagaattgcaaggacgttttccaattcgtgttgaattaaatgccttgacccaagaagacttcgttaagatcttaaaggatccacaaaactcacttttgaagcaatatattgcacttcttaaggctgatggtattaaattagtctttactcaagaagcaattgaccgaattgctcaaatagcttttgaagtaaatcaaggaactgacaacattggtgcccgtcgtttggcaactattttagaaaaattacttgaagatgttctttacgaaggaccagacatgaacatgggtgagatcactattactcagaagtatgttgatcaaaaattgagtgatataattattaataaagacttaacaaaatttattttgtaattttagtagataaagagaagttaaattatggattatcaattaaagaataattttttaacagtaacactttctgataagggtgctgaaattcaaagtgttaaagatgtaaatagcggtcgagaatatatgtggcaagcagatcccgaaatttgggaacgtcacgctccggttttgttcccagtagttggacgtttaaaggacgatcaatatacttatgatggtaaaacttaccatatgggacaacatggttttgctcgggatgcgcaatttactgttgaagaacaagatgataagcacattgttttccttctaacgtctaatgaagatactaaaaaaatgtatccatttgattttgaactaagagtatcttacagtttaatgaataatttgctggaagaacactttacagtaactaatactgatactaaagaaatgatctttggtattggtggccaccctggttttaatttgccaactgataatggtttgaataagaatgattactactttaagttcgatccttcaatggaccatgtgaagattcctttaaaggcaccatatcttgactgggaaaatcgttctttgctcgcaactgattcaatgtttgaaattagtgatgaattatttaaggatgacgcctgggtctttgaattaaagcaacctaacaagatttctattagaactgataagagtgattaccacattaacgtcaaaatggaaaatgcaccatttgtgggtttatggtcacaatatcctaaggctggcaactatatttgtattgaaccatggtggggaattgcagatactttagacagtgatggtcaactagaacataaacgtggaatgaatcatattgctccaaatgaagtttgggagaatggttttactattgcgtttcatgacaaagctaagtaattaagacaaataagactttggttgaaagatcaaagtcttattttgtatgcaggtgagaaaatgaagattggatatttaaaaaatttaggcagacatgagctggaaaaagcagtaagaagatggcaaactttacataaagatgaaaaggtgaatttagagcctgtttcatatgatgagattgaagataagattcaaaacaatgagttagatgcagtcttagttaattcaagacatactatctatcagcaactagctacttatccggttgatgaggttgctgtagtggccctggtgcaagcgggtaattttaataaatatcaacaaactgttgaaatgagtgatttaaggaatttaccttgcattatggtagcgaaagtagaggaagaaaagagcgaataccactatttaaaaggtgttcttcaagttaatagtgatttacttgcggttgaaaccttaggagaagctgttttaatggttgaatctggatctggctatttaattatgaatgaaaaaacagcagcccacattgatgatgaccaagtacaaaagttattcttgttacgagctggaaaacaactagctgaagaatatgcttttattgctaaaccagaagatcagcgagtagaaaaattgagcaagatattaaaagaaattatcaattaaaagtaaaataattatgtaaagctataaaatgatattacttaaaaactctagtgcaaaactagagtttttttataccttggcgtatacaagttcccattctggtaggaattttgttaaaatagaatatatgttctagagagggtgaaaagaagtgctgactaggtcacatagaatttgcagtattgcaatcgtggaactaagcttattattaactaatcgtctattgatcgatccagttaacaacattattattctggctgcgactgccattggcgcttctttacctgatattgatgaatataacagttctgcaagcaagaagtcagtgatcaattttagcctttttcttaaacatcgaggaattacgcattctttccttggctgggctattttttctggcggtctatattatctaatgaataaatttattcctattcatattaataacttaacttctcagaattattggagtgcactttggtttgggctggtaattggatattttttgcatttagttgaagatagtttcagtaagcaaggagtagagtggctagcgccattttataagaaaaaaagaaagtcaccaattcattataaagttggaggttgctttgagaactttttaactatgatgtcttatttagcggtaattatgatgaccttttattggatttggctttctttgacacctgcaacccaagtctttttgttttgaaaagtggatttaagcctgtaagataggtgctgggggaagattccaagagaggagtcctgaatatgtcccaattattagtaatagccggtttaatcggtattttgtatggtgcagttgagcttaaagcccagccaattccagttgaaaatgacacagttcataaaggacgttagttgacctagatgaccaagagctaaaattgctcttggtcatttttattttaaccagtatactggtagaaagaagaatattaaaggatatgaagtatggattcgaatgaattaatttttactaaattggaaaataaacgtttacgttataatttgcttgcagatattttgttaattcttggaggtattttaatgtttagacagcctccaatgagcttattatttcaattacttggagccggtttaattattatcggaaccgtatttacttttttatcatttcgagtaaggactagtaagcaatatcatgacctatctttattagttaaaaatgagccaagtagttttaaggaggtcgttaatttatttggagcaaagttaacggcattagctttgttggtgggaataggtctgatagcattagcaatttgctttttctttttacttagtcgctcttggattaaagctttattgtttttcttaacatttgagactgtaattgatttgaaagattttatgaataatatcacaaaattaaaggatgaaagtgcaatttaggctttcatcctttttatatcaataaaaagatttgtgattttatgagcatattattttactttgattagtggattagatattatagtactataagaattttactttcgagaaagaatcactttaaaacactatataattgcttattctgtaaattttcctgggtgagaataagtaattaaactggaggttatttttattgataagtattgttaagagtaaatcatttggtcttgcagctgtaatgactttaatttgttccgtggcaggtatttttctagcaaaattaccctatgttaacttgattggtgcgttggtaattgcacttttattgggaatttcactgcaggttttaccagttggggtaagagaagaagcagcaccagggattggttttatttctaataagtttttgagattaggaattattttactgggttttagacttaatcttactaagttagctgatgctggtattaaaacaattttagttgcaatgctaggagtaagtggaacgattgttttgacttactggcttagtaaaaaatttggggcagaagatgaattagcagtgttatcagcttgtggctgcggaatttgtggagcagctgctgtaatgggcgtttcccctcaaattgaaagtagagatgaagaacgtaaaagagaaaacgaggtactggctgttgctgtagtttgtgtgatgggaacagtatttactctcttagaaattgtaattaaaccaatgcttgggttaacagattcacaatttggtattgttgccggtggatctcttcatgaaattgcccatgctattgcagctggtagtgcttttggtgaagcaagtttagatagtgcattaattatgaaattatcacgtgttttacttttagcaccagttgctttaataattggatactggtaccaaagaagactggtaaaagaaagtgcgcaagatcatacacaagcacctaagaaattaccaattccttggttcttaggcggatttattttaaccagtattttaggtactttcttaccattccccccagtagttttagatggcttagttcaagcagcgtatgtatttttggggatggcaatggccgctttaggtatttccgttaacttcagtgttattttcaaacgtggtggtaccgtctttggggctgctgcaattagttctacttgcttgatgatcttcatgattatcatgagtaagttattcttttaaataatgataaaaagccgattgcttagtgaagaagcaatcggcttttttacatttgatcatatttactccattgatcctgcaatttttcaattaaaggcataaggcgagtttggttttgctttaagtaacaggcatagaacttttgatgagctacttcatctgataagggacgaactgaacggttattaggaagattattaccccactgtgagtctaaactagttaagttagtagtaaagaagggaagaacggaatactgtaagatttcgctataatctgttgactcatcttggaagattattttgctatctggtatttcatcatgataaatctgggtccaaaagccgatgttagcaggacttaaaattgtttttccttttaacattttaaatgataattctggattttcattaaacttacattcagtaggtaagttaactgacattgattctgtacctaaataagtagaggtaatatcacgattttcaatcggaaaattaagtagtaagcaagtgaattggtgttcagcaagtaaactttcaaaattactttcaattaacttattttcgagttgaacattttgatcattcaaagagcgtagtacgatcattggaccaggcgcattaaccccaagaatgagagtggtttgatccttttcaaattgcttaacttttttactaaaatctagattatcattaagcagttttttagcttctcgagcagtgtattttccagtttcgcttaaatatagtttattaggtttacgaataaaaagtttaacgccaagttgctcctctaattttttcatcgaatgagtaactgcaggttgagttaacccaaggacttcggcggttttcgcaacagttccgtatttggcaaaagttactagttcttctaataagtagttttcaatcatttttcaacctcgttgctataaatctaatttatcctagcatgaaaaattatcaattttcaagcaaaaatatggtccgtataatcgttgatgaaaacttaaagaaaaaagaaagaagaaaactttatggcaaagatagtgattttaactggaagcccacattttaacggtgcttctcaaaaattagccgatagttttgaaaaaggaatagaagaagctgaaaatgaagtttatcgatatgatgctggtcttcaaggtgaaagtaagccgcactttttacaattagaacatgcgccaggaatggaaattggtattccagataatgatgtagtggaaaaagaagttattcccaaattattagctgctgacgtagttgtgttagtttcttcactttattattttggtattaatgcccaattaaaagcagtcatagatcgattttatgattataatcatgaacttaaagataaaaaatgatttttatgatggctggctatggaactcgggaagatatggacgccgtgaagttacgtatggaaaagctcagtagttatatggactggaaaatgattgatcaaacttgtgcggatgattcatggaatgagcaaaaattagaaaaatttgctcagaaagcttataacttaggtaaaagtattaaatagaaaattgaggagaaagaataatgaaatatgcagaatttgttaaagctggcgaaatgaaaattattgataagccaatgcctaaaattgaaaaaaatgatgatgtaattattaaggtagttcggacttgcgtttgcggctcagacttatgggcttacaatggtgtagaagaacaaggtcatgaaaatggcggtcatgaagttattggaatcgtccaagagattggtaaggatattactacagttaaaaaaggtaattttgtaattgcaccatttactcatggttgtggccactgccgagcatgcttggctggatttgacggggtatgtatgagccatgatttaagtgaaaatttctctaatggttatcaagcagaatatgtacgtttccagcatgcgcaatggtcattagttaaaattccaggtaaaccagatgactatactgaaggaatgttaaagtcattcttagccttagcagatgtaatggcaactggataccatgcagctcgtgtagctgatgttcaaccaggagattcagtaattgttttaggtgatggagcagtaggcttatccgcaatcattgcagctaaattacgtggtgcaaaacaaattgtttctactagtagacatgcagaccgtgaagctttagcccgtgaatttggtgcaacggagaatgtagctgaacgcgatgaagaaggaattcagaacttacttgcaattactcgcagcggagctgatgcagtattagaatgtgttggaagtaaactatctaacgaggaagctttgcaagttgggcggcctggatctcgcgttggacgtgtaggattacctcatggagctgaattaaatccaggtttaattttttacaaaaatatgagcgtagctggtggaccagcatcagtaactacctatgataagcaagtcttactaacagcagtcttagatggtaggatcaatccgggaaaagtatttacaaaaacatttactctcgatcaaatcaatgaagcttaccaggaaatggctgatcgaaaagcaattaagtcatatattaaagttaatgattaaggagaataaaatggctagctggagcaaagaagaattagtagcttttaaagaggctcaaacattgcaaaatcgtccttattaatgatgatcatgaaaattttgcagaagataaccctgtctgggaagtaatagttgataagcaagtttttattcgcggtgcaaaaggtattgaaaatactaagtggtatcaagccgggattaaaaatggcgggcaagttgaagtggcaggtaagacatttgaagttgaatatcaacctgttaaaaatgcggaattgattaagcaaataacagctgcgtataataaaaaatatcaaggacaatatccaattgacttgatggtgtctgatccagtttctaaagccacggtcgcagttgtaaagaaatagagaattatgaagaagaaaagtctatttattttaattatctcaagtatcttgttgattctaacgggatgctcaagacaaagtaatagtagcaataaaaaaatacagattatctcaacaccaaccttgtttttccatggtggaggttcttcctaccatgcagaagagcatatggtcaatgccgccaagaaagctggcgtaactaagtcggttattcgagcagaggtttcgaaaactggcaaagttactttagttggcacgtggcctaaaaatgctaaaaatccaatctgtgaagtaaactatgaaaataatcgtcaacttgattttaataaacatagtgcttatgcgactaatgtagtaaagacactccaaaagaagtatggaattaagaaaatcaatatggttggtcattcgctaggcaatatttcaatcatttactacatgcttcagaatggaaacaagaagaatatgcctcaaattcaaaagcaagttaatattgctggtcattttgctggcttagattttgatggaattcctaattcaattaaacagccaaaagggatgaagttgaatagtaagggcaagccaaataagatgaattcaacttatgaacaaatgaccaaagttagaagcatttatgctaaaaagcacgtgaaagtgttgaacattattggtgatgttggcaacggtagtgatggtagggtagataacaggtcatccctttcattgcagtatcttgttagtggtggtaacactacttatcgtgttttgaagattaacggcaaaaatgcacagcattcaaagctccatgaaaatgcacaagttgataaagctcttattaagtttttgtggaataagtgagggcacgtttgattgaaggaataaaggactgatttggattaaaatttctagattggtataatattaaacttaattggtatatttatgtaatataaaaaataatactaatatactaaactctatgaagtattgattaatgtttcatagagtttggttatactgtatattacgttttgataaagaatggagggttgaaaatgctgccaaacaagaaaaaacaaataagatctatagttggaatgttggttttactcatatttttaatcctggtgaatgtatatcagcagagattagatgtatattggactagttttttgattatcggcggaagcctattgttgattggagttatttatcagattataaaaattatcaaggaatagttagataatagatgaatttattgaaatataaattaactatttatgattgattttgattagatttcatgatatcttaatcatatcaattgaaattcacctttagaaagaagggtcgctgttgcgtctttaatcttgcaaaactaagcatagttgaaattattcgttttttattaaagggatgaactatgcacttttgacaagattattagacggacatgatcttcttttaatacgtaaaaacatgaagagtctgtacttgtcataagtgcaggctctttttcgaggtgatttgagtgagcagcattaaaatttcgaatgtatcatttaggtatgaagatagcagcaacaatatttttaataatttaaatctagatttagatagctcttggaaattaggattagttggtagaaatggacgagggaaaacaacttttcttaatcttttacagggaaaattagttggaagaggtaaaattcaaacaaaattgaatttttcttattatccaattaggattaaggatccagctaatatcactttatacggattacaagatcaaattatgtttgaacaatggaaactagaacgtgagctgaatttaatgcatgttgactcaagtttaatctggcagccatttaatactctgagcggtggagaacaaactaaaattttattagctttatcatttattgatcaaaattcttttcctctcattgatgaacctacaaatcatttagatgaaaaaagtcgtcaggaaatctgtaaatatttaactaaacatcataaaggatatattgttgtaagtcatgatcgtaattttttaaatcaagtaactgatcatgtgctagcaatcgaaaataccgaaattcatttatatcacggaaattatgcaacatatgaacaaattaaagaagaccgtgatgaattcaatcgtgaaaaaaatgaaaaactagctggcgaaattaaaaacttacataatcaaaaagaacaattttatcattgggcacaaaaaatagaagctagaaaaaatttgggacaaaaaacacaatatattcttaaccgtagagctagagtaaataaggctgcgattggacatgcagcagccaaaatgatgaagaaatctattacacgtagaaatagaatggataaaaagattgaagaaaaagaaggattgatggttaacattgaagatataccaaaattaacgatgaactttcaagctaattatcattccactcttcttgaaactagaggtttaggtctaaaggtaggagataaacatctattttctaatttgaatttgatagtaaaaaatcatggtattgttgcacttgaaggtaaaaatggctctggaaaatccacttttttaaaatttttattgaataaagtctcagcaaatagtaatgggagatgcgtgctagctaatgggttaagaatttcgtatttaccacaagatttcacaatatatcaagggagtttaaagaattttgcgcttcatcaaaaattatcttataaagatcttctgaatattttaaaaaagatgggctttcctcgaactaactttaatgtgccaattgaagagatgagtatgggacaacagaaaagaattgctttagctaaatcactacttgagccagcagatttgtatttatgggatgaaccagcaaactatctagatgtctttaatcaagatcaattgattaatttactacaagaaataaagccagcaatgcttttaattgaccatgaccagtattttattaaacaagttgccgataaaagaattaaattagcaaattaaaccatattaaaaaatggataggggaaaagaaacctatccatttttatttacttatttagttatgtggaaaaaatgattaattaaaattcgaattttcttgtaaaaatagggtgagtacgatgatctaagtaggctgcttcttttggtgtaatttctaaaacccgcagatcttcttttgccccttcaatatcatctgcatatatttcatttaaataatcatttttttcaaaaatctcgtcaatatattcatgttcgacatttttaattattccccggattgaaaatccacatgaatccatcgtgccatctcctttgtacccattaataatcaccttaggttgatggatcaaatcttgaaagaatggattttgactagaggtaacaatgtagagcttaccatttttattcaaaactagatcacagacttgagcagaaggtgcaccatgatgtgtcgtagcaacatcaacattgtgaacttcattagtcgcaaattctaagaattcttcattactagtttgattatttaagatactaaccatgtctattcctcacttaaatttatttttattcaagttctattatagaatggatttgtgatatatctatattagaagtatttgattcgaagttttctataattatatttacttgaaagtatgttggcttgtaagtatacttttaatttgtaagtagatatacaacctatattggaagaaggaagattgctgtggcagaagaaaaatattacggtgcaaatgcaattgttgatagcttaattaatcatgatgttaaatttgtctttggaattccaggtgccaaaattgatcgagtatttgaattacttgaacattctaaagatccacgtacgcctaaatttgttttaacgcggcacgaacaaaatgcggccttcatggcggctggagtaggaaggattacaggaaaacccggtgttgtccttactacttcagggccgggtgcatcaaatttagcaactggcttagtaactgctacagcagaaggtgatcccgtactagctatttccggccaagtgcagcgaacagatcttctgcgtttaactcaccaaagtatgaaaaatgcagctttatttgctccgattactaaatatagtgccgaagttcaagagcctgagaatatttctgaggtgattgctaacgcatatcaagaagcagaggcatctaagcaaggggcaagttttgtttctgttccacaagatgtaactgatgcagaagtaaagacgagcgtgattgcaccacttgagccgccaaagttaggaccagctagtccaattgaatcaactttactttcacagcgtattaaagccgcaaagcttcctgtacttttgttaggaatgcgggcatctgatccagaaactaccagagctatcagacgtttaattgcggaaactcatttacctgtagttgaaacttttcaaggtgctggaattatcccacgtgaattagaggatgatttcttcggtcgtgtaggtttgtttagaaaccaaccgggtgatcaattgcttaaaaagagtgatctggttattgcaattggttatgatccaattgaatatgagcctcgaaactggaattctgatcgaagcgcgaatattgttgtaattgattcgatgcgggcagaaattgataaaaattatcagcctgagcgagaattggttggagatatttctcaaactttagacttcctcttaccctatatgaagggctattccatgccgaatgaatctaaagagtatcttgattcattacgtaaaactttgcaaaaacgtgatacaccacctgctgtgactaaagatcaagtgaaaagtcatcccctaagtattatccaggccctacaagaccgagttaccgatgacatgacggtaacagtggatgttggtagtttttacatctggatggcacggcactttagaagttatgaaccacgtcatttgctttttagtaacggaatgcaaacacttggagttgctcttccttgggcggtcgcagcagctttggtaagaccaaatacaaaaattgtttctgtttctggggatggaggcttcatgttctcctcacaagatttagagactgctgttcgattaggtttgaatattgtccatattatctggaatgatggaaattatgacatggttaaattccaagaagaattaaagtatggcgattcagcagctgttaaatttggccctgtagactttgttaaatatgcagaaagctttggtgctaagggttaccgtgtagagaaagcagctgacttagataggattttggataaggcctttaaggaagatggtccaactgtggttgatataccagttgattacagttttaatcaagaattaggaaagacaatcttagaggatcaactgcattaatggaaggtagaaaaattatggcaaaatatgaaagcaaggtttatcaacatggtactttggggatgctggtgccaggattgtttgaagggacaatgacagttgcagatctgttaaaacacggtgactggggcattggaacagctagcggccttgatggtgaaatgattttacttgatcatgtaccgtatttagctcaaagcaatggtgaaattagaatcttaaaaccagaagaaaaggtcccatttgcgacagttcactttgaagagataaaagatagttttaaggtcgaaaatttaactcaaaaagaattagaagataaaattctagttgattacccttataaaaatgtctttttcgcagttaaaattgtgggaactttttcaactgttaaaacaagagtagttgaaaagcagacaaggccttacaagactttattgcaggtagcagatgaacaagctgtttttgaatctactgatgtttctggtacagtcataggttactttgcaccgaagatgttccaaggaatggcagctgctggataccatttgcattttttagcagataataagtcaattggtgggcacttattagactttaagataaaagaagcaactgtttatttacaaccatttactactattgagcaacatttgccaatggataaccaggaatttttgaacaaagatttggatattgctgatatgcatgatcaaattcaaaaggctgaaggataaaaaagcagatcattaccgctaattatggtagtgatctgcttctttttataatttatgatttaactgctttacttggatttttacttgatggtagatacagagccaaataattaagtatccgatgatatacagtgcagtaaaaactagaaatgggataagttgtaactcaatccaattgttaaaaacataaaagagaaggtagtcaacgtaaattacaattgcatcaatcatagttgcaagtccaagagagattttttcaactttaaagactgcactagtacctcctgcgataaaggctagtaatagactggaaagaatattcttatttacgttttgaatcgaaatagtatggaagttaatggtaaaagaataaatataataaaaaatcacaagaattaaggggccaaatcctgcagctttcaggccacttttaataaaatttttgataaaatctttcattttaattcagttccttcctaattttagaaaagcatcgtcttgaaacataatcgcttaacccatttttcataatgacattcacaccagaagtttttgtttctttaaattgatcgatataggaacgatttataatagtagatttattgatacgccaaaaattagtggggagaatatcttctatttggtagagtctttttctgatgtgatattgcttattgttacagatagcaaaaaccttattttcaataattgtaaacatcataatatcgtctaggttaagcataattaaatctttgtcatcataggcaggtattatatttgaattgccatttgataaaacgaattgctctaattgagtagaaaaatcattttttcgatggacggtagcttcgacaatttcttgactgtttggattaataaataacttaaatttcatttcttactcctttcaagttaaattatatcgatataggagatttttactttgatttatcagtcatcggtcgaaattgacttttaatcggtaataatattttgatttcaaaaatataaaattacgaaagcaagcgttgaccctttttgttatttaaatgaaataatattacgcactaataaaattattaattaaatattatgcaatatgcttattagcacaatactatttataggaagatttaattctaaagaaagtcatataaattatctaagagtatagaataagaaaagattacatgttactatatcacttgtaattaattttagataatagtacattaacagtgatgacgagcatttatgttaagtagtaaaagggatgataaaagtaaggttaaatagatttaaaatttaagctaatttaaataaataacttgtctaattaaacaaacttaaattttgaagttggaggaaaatatggtttcaaaaaacaatattgaaatgaaatataaaaaaatgagagacgaaaaacaacgtttctcaattcgtaaatttagtgtgggagctgcatccgttttaattgggctaagttttagtttatataacggacaacaagcatttgctgatactgttgataatggcaataagtctgttgtagcaaatgcacaagataaagaacaaacagacaataaacaaaatactgatactaatcctcaaaataacgaagataaaacaaataataatcaaactcaaaatacagtaactgctgatcttgatcacagtactgttggggctagttacaaggctgatactactaatgctagcgaagctaacaagagtagtgataagtcagatgaaaagcaagctgcaactactgaaactgctaaaactgaagaagctgctactaaggaagtagaagcaaagaatactgcaaatgatgatgtagctaagaaaactgaagaggcagctgctaagacagatactaaggtcgatgttaataaaacagtagtagaaaatgtaaagactgaagctgctactcctaatgtagagactaggaacattgaaactcaaactgcaaagactgatgaagaaaaagtagaaacagcagttgacaatacttcttctgatttaaaaaacgcagtagagaatgcaaatactgaagtttcaactaatacatttaacgtaaataaagcagttcgaaatgcattattccttagtgcaaataatcttgctgaacgtaaggtagcagctatagcacttccagctgaagcagaagatcctaatgccgtaacagttagtgatgcgaagggatttattgatgcaattcaaaatgggactgctactactattaatgttgcaagtgatcttaatttagcagaccaaacagataagaagtatacagaaattaatatcaagaataagcgtaatattgtaattcaatcagataatccagaagaaaaacgtacaattgatttctctggatattcatttgatatgaatacagagaattccgtaacctttaaagatttgaatatttatgctcgtagttactggggccttgtttataatgctggtggctacacatttaataatgttaactttactggttcacaacttatctatactaaaccaagtattaattcaaccttaacatttaagaataatattactgcaaattctgtttcctcttatgtaggaccacttgatggtaagacccgcgatactcaacaaaacggtgggcagcaaattcttcaatttgaaggtggaacaaatcaaattatttttgatgaaaacagtaatgtgaccttaacaacagaagatgctaatgctcttgaaattgatggtgggaccacaacaattgatgtaaaagacggtgcaaatgtagcaattaatccacattctaagggtaatcctgaaagtcgtaatggaattggaactgggtatgttgctcgtgctattgctgccaatgcaaagatgacaattaatattgatccaaattcaactttaactattaatactgaaaaggtagatgacgataaagatgttgcaggagcattatatttaaattctgatgctgctcttaatgtaaatggtaaattagttatcaattcaaatggcacaccaagtgcaagcaaaagcaatggtgttccagtatacatcaatggaagtgcaaatattaatgttggaaatggtggtagtttcgtattagatgctacaaatcttggagactatagttcaagtctaatttctgttaatggtaaggggacggttaagttagatcctcactctactttcaagattagcggtgacggtactggagctgtaactgcaattaatctttcaagcggtagtactttcacttctgaccaaccagattcatttactattgatctctccgcaaataccagtaatggtaagtcactaattaaaaatggtactattaatttcagtcgtgttaagacggttactgatggaaacgaatcacagcctttgggcaaaattgatgtaacttatgatagaaatggtaatgctacttcttacacaattactgcacaagataaaaatacggttaatcaagtagcagagggactggctaacaagagcttgattagcttagttaaagctggtgaggacgttaccctatctaaccttcatttaagtaagaataatgtattgactggtactgtagcttcaagtggtagtgacaatccaatttatgtaactgttaccgttggtggggtaagcactaatgtgccagtagtaggacattacactgtgtacaccaaaactaataaaacagtaacttcaaacaatgttgattacgctgcacaaactgcttcaactggtggtaatttctctattgatttatcaaaacttgcaagtagcttgactaatgatgcacaagttacagttactgctacaaaagatttcgttgaatccgctcaaactaaaagcgtagcagcattacgtgcacttaatactactactcttaaagaattagtagatgctgctccagcagaagaagcaaagccaagttactacaatgctactgaagaagctcaaaaggcctatactgatgcaatttcaaaaggtaatgacattcttgccgatccaaataattacgatcaagttgacgttgataatgccgtaactgccattcaaaatgctcagaaggctttaactggtaaagaaactgataagaaagcccttcaaaaagcagttgatgacgcatcaaaagtagaatcaagcgataactacactaatgcggatgctaggcttcaaaatgattaccaagctgcaattaaagcaggtcaaggtattttaagtaaagaaaatgctactcaaactgaggtagataatgcattaactaccattaataatgcaaaagatgctttaaatggggatgctaagaaagctgcaagtaaggaagctcttcaaaaggcagttgatgaagcacctactgtaaaatcagatgatgcagcatactacaatggttctgctgaagctaaaactgcttatgacgatgcaatcagtgcaggtcaaatagttttagataatccagatgcaactgctactcaaattactgatgctttaaatgccattaatactgctaagggtaatcttaagggtgaagcaactgataaagcagcgcttcaaacagcagttgacaattctgcaactgtaaaagaaagcaataactatactaatgcagaccaaactcaaaagactgcatatgataaagcagttacagctgcacaaacagttttagataaaactaatgcaactcaagcagaagtgaaccaagctcttcaagatcttgaaactgcaaatcgtaacctaaatggtgatgctaagactgaagctgcaaacaaggctgccttagaagctgctgttaaggatgcgccaaatgtaagaaatacacctgcatactacaacggtagtgaagaaacccaaacagcatataataatgcaattactgctggtcaaacagttttgaatgaagcaaatccatctgcaagtgaagttaagaatgctttagatgcaattaatgcagcaaaagataaccttaaaggtaaggctactaacactgaagctttggaaacggctttaaccaatgctaataatgctaaggaaactggtaattacactaatgccgaccaagcaaatcaagaagcccttaataatgcgattattgctggtcaagagattttaaagaatactagtgcaactcaggcgcaagtagacagtgcagcaaaggctattactgatgcaattagtggtttgaatggggatactaaccttgcaaatgctaagactgctgctactgaagatattcaaaaggctttagatactaagactaccgaaatcactgacgctactaatattgatcaagctactaaggatcaattaattgccgatgctaagaaggcagcagaggatgctaatactgcgattaatcaatcaaccgatactgatacagttaatactgctaaaactgaagggattgctaacatcaataaggtaacagttccaagtttagccgatgctaaaactaaggcagccaaagaaattgatcaagcattaactgataagaccaaggaaatcaataacgctgaaaatattgatcaaacaacaaaagatcagttaattaaagaagcaactgatgcagcaaatacagcaaaggatgctattgaaaaatctacaactaatgacgaagcaactaaagcaggccaagctggtgtagatgcaattaccaatgtaaaggtaccaagcgttactgatagtcaaaatgctgcaaaagaagtaattgatgatgctcttaacgctaagactaaggaaatcaacgatgctaacaatattgatcaaacaactaaggatcaattaatcaaagaggcaaccgatgcagctaataaggctaaagaagccattgataaagcaactacagctgacgcaattaagactgcacaagatgaaggaacaactaatattaataatgttactgttccaagcttggaggatgccaagaaggcagctaataaagcagtagatgatgctcttactgctcaaactgaggtaattaataaagctaataatcttagtgatgcagaaaagaaagatttaattgatcaagtaactgctgaagccaataaggctaaagaaaatattgaaactgctacaacaaacaatgaggcagctcaagctggtcaagctggtgtggatgcaattaagaagattgttccaacaagcttagatactgtgaaatctgatgcaaataaagcaattgacgatgctctaactaagaaattagaagagatcaattccgctaatgatttaactactgatgaaaagactgcattgacacaagaagccaatacagctgcagataaggcaaaagaagaaattaccaatgcaacgactaatgatgctgtaattgaagcacaaaataatggtgttactgcaattgatggcattaaagttccaactgaatcagcagtcaaagaagcagctaagcaggcagtagccgacgcagcaactgcaaagaatcaagcaattgatgcttcaaacttaacagatgaagaaaaagctgccttgaagcaaaaggttactgatgcccaaaatgctgcagatcaagcaattgacaatgcaacaacaaatgcggcagtaactgaagcacaaaccaatggtattaaggcaattaatggtattgaagtaactacctcaactgttaaagaagcagctaagaaggcagtagccgacgcagcaactgcaaagaacaatgcaattgatgcttcaaacttaacagatgaagaaaaagctgccttaaagcaaaaagttacagatgcccaaaatgctgcagatcaagcaattgacaacgcaacaacaaatgtagcagtgactgaagcacaaaccaatggtgtcaatgcaattaatggtattgaagtaccaactacatcagctactaaggaacacgccataactgaccttaatgcggctgttgatgatgctaagaaagcaattgatcaagatagtaacttgactgatgaagagaagcaagcagctaaggatcaaattgatagggatgctactaaagcacaagaagcaatcaataatgccaaaactaacgatgatgttaagaaggcgggtgacgctggtacattagcaattgataaagacgttgctaatgcagccattgataacgcagttgctgggaagaaggccgaaatttccaagaccccattaacagatgaagaaaagactgctttgaacaatgaagtagatcaaaaagctcaagaggctaaagaagcaatcaataatgccactactccagaagcagtaacaactgctcaagacagtggtgttaataacattaatgaaacttcagtgccatctgaatcagcagcaaaacaagcagctaaggaagctgtggctaaggcagttgatgaaaagaatgcagcaattgattcttcaaacttaaccgaagaagaaaaagaagctttgaagcaaaaggttactgaagcacaaacagctgcagatcaagcaattgataatgcaactaccaacgctggagtaactgaagcacaaaccaatggtgtgaatgcaattaatggtattgaagtaccgaataaatcagatgctaaagaacaagccataactgatcttaatactgctgttgataatgctaagaaagcaattgatcaagatagcaacttaacagatgaagaaaaacaagcagctaaagatcaaattgattctgatgctaagaatgctcaagatgccatcaacaatgcaaagactaatgatgatgttaagaaggcagcttatgacggtacattagcaattgataaagacgttgctaatgcagccattgataacgcagtcgctggtaagaaagcagaaatttctaactcatcattaacagacgaagaaaagactgctttaaacaatgaagtcgatcaaaaggcaaatagtgctaaagatgcaattaacaatgcaactactccagaagcagtaactactgcacaaggaaatggcattaagaatatcaatgcaacttccgtaccaactacatcaacagctaaagaagcagctaagaaggcagtagcagaagctgcagaagccaagaacagtgcaatcgactcgtcaaacttaacagatgaagaaaaagctgcattgaaacaaaaagttactgaagcacaaaatggcgcagatcacgctatcgataatgcaactaccaacgcagccgtaactgaagctaaagacaatggtattagtgcaattgacggcattgaagttccaattacatcagctactaaggaacaagccataactgatcttaatacggctgttgatgacgctaagaagacaattgatcaagataacaacttaactgatgaacaaaaacaagcagctaaagatcaaattgattctgatgctaagactgcccaagatgccatcaacaatgctaagactgataatgacgtaaacaatgcagttaacagtggtaaggttgccattaacaaagatgttgctaatgcagctatcgacaatgcagttgctggtaagcttaaggagatccaagatccattaactactgaagaaaaacaagcttacactgatttaattaactctgaagcaactaatgcaaaacaaaatattgctaatgcaactactgttgaagcagtaactactgcacaaacaaatggtgtaaatgaaattactaataccgaaattccaactacttcttccgccaaagaaaaggcaattgctgccatcaatgatgctcttcaaacgaagaccgacgaaatcaacaacgcatctaatatcaacactcaagaaaagactgatttaattaatcaagcaactgaagcagccaatgcagctaagaacaatatcaacaacgccactactaatgctgatgttgatactgcacaaataaagggtgaaaaagcaattgctgatgtaacagttccaaacttgtctgatgttaagaaagaaagtattgatctaattaacaaagctttagatgccaagactaatgaaatcaataatgcttctaacctttctcaagatgaaaagcaaggtttgatcaatgatgcaactaatgccgcaactgaggcaattaacaacgtcaaccaagctcaaacaaatgacgatgctaaagctgctgcaactactggcgttcaaaacatcgaaaacattactattccaactcttgatgaagcgaagaagaacgctaaccaagctattgatgatgcattgaactctaaagtaaatgagattaacaatgcttctaacttgaatgaaactgaaaagcaaaaattagttgatcaggcaaatgaagcagcaactactgctaagaataatgttgaaaaggccactaccaatgatgatgctcgcgatgcagctaatgctggaattgataacattaaaggtattacctttacttcactagaagatgctaaaaatgcagcaaacactgcaattgacaatgctttgcaagttaagacagatgaaattaataatgcatctaacttaagtactgaagaaaagcaagacttaatcaatcaagcaagtgaagtagctaaaaatgcaaaagacaatatcaacaatgcaactaccaatgatgctgtaactgaagcacaaaataagggtattgcagatattgccaatgtgactgttccaagcttagatcaagttaaacaagatgcaatcaatgcaattaagcaagttcaagatgctaagaataagcaaatctctgctgcatctaacttaagcactgaagagcaaaaagaattaagtgatcaagtagataaaattgctaacgatgcaattgctcagattaatgattcatcaactactacaaatgatgcagttactgcaacccgtgatgatgcaatcaagcaaattactgatctatttattccaactctagacggtgcacaaacagatgctcttaatgcaattgaaagtgctaagaatgctaaactaaatgacattaacaacgctactcacttaactgatcaagaaaagcaagctttagttgatcaaaccaataaagtggctgatgatgcaactaaggaaattaaggctgctcaaacaaatgacgcagtcaagagtgcagaaacagctggcttagataacattaataacattgctattccaactttagttcagaagcaacaagaagctattgaagaattgaatgtagcacgtgatgctaagagtagtgcaattgataatgctactgatttaactactgatgaaaagaacagcttgaaagataaagttcaagcagaatacagtaacgcggtatcaaatatcaccagtgcaacaactgatgaagcagtaacaactgctaaagaaaacggcatcgcagcaattaaagacattcaaattccaactaagtcacctgctaaggaacaagcaacaagtgaccttaatactgcagttgatgaagctaagaacgcaatcgatcaagacaacaacttgactgatgaagagaagcaagcagctaaggatcaaattgattctgatgctaagaaggcgcaagaagcaattgataatgctacgactgatgatgaggttaatagtgctgttgataatggtaagcttgccattgataaagatattgctaatgcagcaatcgacaatgcagttgctggtaagaaagcagaaatttctaaatcatccttaacatctgaagaaaaagctgatttaaacaatgaagtcgatcaaaaggctaaagatgctaaagaagcaattaaggctgccactactccagaaactgtaactactgcccaagaaaatggtattaagaatatcaatgatactaaagtaccaactgagtcagcagctaaagaagctgctaagaaggcagtggcagaagctgcagaagccaagaacaatgcaatcgattcttcagacttaacaaatgaagaaaaggctgcattgaagcaagaagttgctgatgcacaaaacgcagcagatagagcaatagatgctgcaactacaaacactgcagtaactgaagcgcaagacaatggtattaaagcaattgagaatgttactgtacctaccgaatcagcagccaaagaaactgctaagaaggcagtagcagaggctgcagaagctaaaaacaatgcaattgattcttcaaacttaacatctgaagaaaaagctgcattgaaacaagaagtagcagaagcacaaaatgctgccaataccgcaattgataacgcaactaccaatgccgcagtaaccgaagcagaagataatggtattaaagcaattaattctattgaagtaccaactaagtcagatgctaaggaacaagcaacaagcgatcttaatagtgctgttgatgaagcgaagaaggcaatcgatcaagatagcaacttgactgatgaagagaaacaagtagctaaagatcaaattgactctgatgctaagaaagcgcaagaagcaattgatactgctaagactaacgatgacgttaagaaggcaatcgatgacggtacattagcaattgataaagacgttgctaatgcagcaatcgataacgcagttgcaggcaagaaggctgaaatttctaagtcaccattaactgatgaagaaaagactgctttgaacaatgaagtagatgaaaaggcaaatagtgctaaagatgctatcaataaggcaactactccagagggagtaactgaagcacaaaatagtggtattaaatccattgatgatgtcaatgtaccaactgagtcagtagctaaggaagcagctaagaaggcagtagccgaagctgcagaagctaagaacaatgcaattgattcttcaaacttaacagacgaagaaaaagctgcattgaagcaagaagttagtgatgcacaaactgctgctaatactgccattgataatgcaattaccaacgcagaagtaactgaagctgaagacaatggtgttaagacaattaatggtattgaagtaccaactaaatcaactactaaagaacaagcaacaaatgatcttaacaacgaagttgaaaatgctaagaaggcaattgatcaagataacaacttaactgatgagcaaaaacaagcagccaaggatcaaattgattcggacgctaagaaagctcaagatgccatcaacaatgctaagaataatgatgatgttaagaaggcagttgatgatggaaaactagtaattgacaaagatgttgccaacgctgccatcgataacgcagttgctggcaagaaggatgaaatttctaaatcaccattaactgatgaagaaaaagctgctttaaacaatgaagttgatcaaaaggcagaagaagctaaggaagcaattaaggctgccactactccaggagctgtaactactgcacaagaaaatggtattaagaatatcaatgagactgaagtaccaactgagtccgtagctaaggaagcagctaagagggcagtagctgaagctgcagacgcaaagaataaagcaattgattcttcaaacttaacagacgaagaaaaagctgcattgaagcaagaagttagtgatgcacaaactgctgctaatactgccattgataatgcaactaccaatgccgcagtaaccgaagcagaagataatggtattaaagcaattaattctattgaagtaccaactaagtcagatgctaaggaacaagcaacaagcgatcttaatagtgctgttgatgaagcgaagaaggcaatcgatcaagatagcaacttgactgatgaagagaaacaagtagctaaagatcaaattgactctgatgctaagaaagcgcaagaagcaattgatactgctaagactaacgatgacgttaagaaggcaatcgatgacggtacattagcaattgataaagacgttgctaatgcagcaatcgataacgcagttgcaggcaagaaggctgaaatttctaagtcaccattaactgatgaagaaaagactgctttgaacaatgaagtagatgaaaaggcaaatagtgctaaagatgctatcaataaggcaactactccagagggagtaactgaagcacaaaatagtggtattaaatccattgatgatgtcaatgtaccaactgaatcagtagctaaagaagcagctaagaaggcagtagccgaagctgcagaagctaagaacaatgcaattgattcttcaaacttaacagacgaagaaaaagctgcattgaagcaagaagttagtgatgcacaaactgctgctaatactgccattgataatgcaattaccaacgcagaagtaactgaagctgaagacaatggtgttaagacaattaatggtattgaagtaccaactaaatcaactactaaagaacaagcaacaaatgatcttaacaacgaagttgaaaatgctaagaaggcaattgatcaagatagcaacttgactgatgaagagaaacaagtagctaaagatcaaattgactctgatgctaagaaagctcaagatgccatcaacaatgctaagactaacgatgacgttaagaaggcaatcgatgatggtacattagcaattgataaagacgttgctaatgcagctatcgacaatgcagttgctggtaagcttaaggaaattaatgattcattaacaaatgaagaaaaacaagcttacactgatctaatcaataatgaagcagataatgcaaaacaaaagattgcagaagcaactactcctgaagaagtaactcgtgctcaagaagaaggagttaagaacattaataatattaacgttccaactacttctccagctaaggacgcagcgaatgctgcaattgatcaggctttgaagaacaagaaggatgaaatcaataatgcaactaacatttcttctgaagaaaagactgatttaattaaacaagcaactgaagctgcaaatattgctaaagacaacatcaacaatgcaactactaattcagaagttgaaactgctcaagttgatggtgaaaaagctattgcggacgttactgttccaggtttatctgacatcaagaaggaaagtattgatcttatcaacaaagccttaaatgaaaagcaagatgaaatcaataacgcttctaacttgagtcaagatgaaaagcaagagcttattgatcaagcaaagaagattgctactgaagcaattaatgaaatcaataatgctcaaactaatgatgaagctaaggaagctgcagatactggagttaagaacattgaaaatgtttcaattccaagtattgaagatgctaagaagaatgcaactcaagcaattgatgatgctttgaattctaagaagaatgaaattaacaacgcatctaacttaactgattcagaaaagactgatttaatcaatcaagcaactgaaattgccaatgctgctaaggatgctatcaacagtgcaacgactaatactgcagttgaagctgccgaatataaaggtgttgctgatattaacaacattcacttcactaacttagacgattctaagaaggcagcaaatagtgcgattgaagatgctttgaacactaagaaggatgaaattaataatgcatctaacttgagtgattcagaaaaggctaagttaatcaatcaagcaactgaaattgccaatgctgctaaggctgcaattaacaatgcaactactaattcggctgttactgcggcagaaaacaagggaattgaagatattgcaaatattaatgttccaagtttagctgaaactaaacaggcagcaattgacgcaattcagcaagttcaaaaagctaagaacagtcaaattgaagaagcaaagaatctaagtgcagacgagcaaaagaacttaattgatcaagtaaataagattgctcaggacgcaattaataagcttaacgatccagcaacaactacaaatgaagttattactgacactcgtgataaagcaattgatcaaattactaacttgttcattccaaccttagatagtgtccaaaaagatgctcaggaagcaattaactctgctcaggaaactaagattgacgaaattaataaggctgataatttaactgatcaaatgaagcaaaacttaattgaccaagtagatcaagttgctgataaggctactaaggccattaataatgctcaaacaaacgatgatgttaaagaagcagaaatcgagggcttagaagatattgatagcattaaagttccaagcttagttgaaagtaaggatgatgctattaaggaaatcaatgatgctttgaagaagaagactgatgaaatcaatgcagctgatcttgatcaaaagcaaaaagacgaattaatcagtcaaattactgatattgctactgagactaagaccaaggtattcaatgctacaactaatgcagaagttgatgctgaagccgaagctggtattaaagccatcgaagctgtgaagattccagctcgtactgctgacaacagcaatactgagagtgaaagtaaggaacaaactgtaattacaaattcagttcaacctaagagaaatgctgttcatcataagaatggcactccagtaaacaagaaggctactttaccacaaactggtaagaaggataactctaacttaacgttagcaggagctgcacttcttggtttagcaggtgtattctcattgtttggattaggagacaagagaaaaaagaataaatagtcaacatcgttgatatgaaaaagagcgatactccctaaagtggaatatcgccttttttgtttggaaatgtaataaaggcagaagcacaattaaatgcttctgcctttattacatgattttattccgcttgactgggaataaaaatgaaattactggtataactacataaagaatcatggcaagtctaggaagaacaaacgatagcccaatgagaacaatatttaaaaataaggtgacagcaacctttctaataaaagatcgactaataataatgttcatgatttgggaatatttcgccgtcttcttagcaccaaaatattgaatcaaatattctaaaattttagcaattaaaaatactattccaaaattagctactgcaaatgttgaactttctgccatgatccattttgtcataactggaagtagagaaaggtcagctaagaaaaagaagtctaagacagcaattgttttctcaggcttaaatatatagtaggaaaatgctaaatgtagatcataccaaaaatcagctacgatgaagaatgtaattaaaaagacaataatatttgcgagaaattgtccatagtggatttcattaatagctggctggatttctaatacaataattgtaataatgattgccattactccatcgttgaaagcttgcaggtgttcacgcaggctttctggttcttcttcttgtgcttgaataagttcttgacgaacagtttttaatttctctttttcttgctttgaaaaatcgttaaaagtatgttcttttctatttcttcttttcattttatctttccttacaatttactaacattagcattttacaatatttaaagattgttattaagatggaaataaataaaatatacatttaagctatagagattgatacattttgaatcttaaacggttaaaaatttttcttttaaaataaatttagtaaagaaaggaatgtttttatgtctatttttgatgaaactttaactatgaataatggtttaaaaattcctaagatggtacttggagtatggaagattccggatgatcagcagttgaagaagcaattaagattggatatcgccatatcgatactgtttaggcttatgggaatgaacgaggagtaggtgaaggagtaagaaactcaggaattgctcgggacaaaatttttattaattcaaaagtcgctgctgaaataaaagattataaaaagacaaaagcatcgattgatgagactttagagaagatgggattaaattatctagatatgatgattattcataattctcaactttggagtgaagtaaatcaatcaacggatcgtcactttgaaggaaatcttgaaacttggcgtgccatggaagacgctgtaaaagaagatttagataatttaatgcagaatagttctactaacctgctgttaatcaaattttagttcacattttttcttgcaagattctagcaaaaagagcaatatttttactatagactattaaagatagaggggaagttaatgcttaagaatattatctttgactttggaaatgtcattatgaactacaatccagatgaaattttaaatcattatgaattgagtcccgaggatcatgatttagttagaaaaactatttttgaatctaaagaatggggcaaaatcgacgctggaaaaattacagaggaagaagccactgaaatttttattagtaaagttccagataagctaaaaagtaaagttaagcaaattatggcaacttggccagaaaatgttgatttctatgagccagtttttaattatatggaggaactacgtaaacaaggctataagatttacggtttatccaatactggaatacagtttgctaattttgttaaaaattctgagatgggcaattattttgatggttatgttttttctgcccaagagaaattaatgaagccagatagaagaatatatgaaagattaattgctcgctatattttaaatccagaagagagtatatttatcgatgatttaaaagcaaacaccgatgcagcaaagaagcttggtatgttagcttttacctttaaaattgataaacttggcgaattacaagaatatatttctaaccattaagtaaattttaggtgattgaaaaatgaaaacaaatgatcaaattgcaaattgggcaatggatttgcagagcctagcgcaagccggattaagatatggccatgatgtttttgatcgtgaacgctatgaagaaattcggcgtattgctggtgaaatgatggctgctaggactggaattccagaagaaaaaattaaaaccttgtttcttggagatgagggatatcaaactcctaaaattgagactcgagctgcaatttttaaagataataaaatcttattagttcgtgaaaaaatgtctcaagaatggtcattgcccggcggctggaacgattatgatcaaactgtcgcagataactgtgttaaagaggcttttgaagaatctggtagaaaagtagaaccaattaaaattattgcagttcaagatcgtaatcatcataataagccaattttagcgactaacgttactaagattttctttttgtgtaaagaattaagtggtacatttactcctaacgatgaaacagatgcttgtgaatactttgctctagataacttgccaaacttatctattgatagaaacacagaagaacaaattgcaatgtgttttgaagcaaataataatccaaattgggatactaagtttgaataaaaatttattacaaaatagctccaagcagtttacttggagctattttaaatgtctattaaaataaaaagaatcaaattaatattgaatttactatttaaaaataatcctaaaggtgagttggaaagcaggacggtaagatatggaaaaaacaaaaattcttttaattgaagatgaggagagcctagctagttttattcaaccagagcttgaattagaaggctatgaggtagtctgggctaaagatggtaaagaaggtcttgaattttttgaaaaagaaaaaccaactttaatccttttagattggatgttacctgtttatgatggcatcactgtcttaagaagaattagaaaagttagtgacattcctattattatgttaactgcccgtaaccaagcttctgacattagtaatgctttagatcaaggcttagacgactatatgaccaagccttttgaaatagaagaacttttcgcccgaattagagtgattcttagaagattagaacgagaaaagagacgggttgtcagttctaccttagaatttagtgttttaaaaattgacttggtttctcataaattttggtgcaagggtgaggaaatctacttaactccaaaagaatatgcattgctatgtgaattaatgaatgatcctgaaaaagttaaaagccgggatgaattattagatatcgtatggggatatgattttgtcggtcaaactaacacagttgatgtctatataagagcgctgcgaaataagttgggaaaatatcgtaatttgattaaaacagttcgtggatatggctattgcttaagaaaggtggacgataatgaataaaaaaataagaacaacttcccaacaattaacacagttgtttctaactttattcattattattctcttcctagttaatttagcatttgctggtatttcaacagcattcatttataataatgctcatgagcaagcagaagaagttattgatacaattagtgataatattagtgaccatgatgagcataagaataaaaatgaatggaaattatttctaaatgcttatcttgctagacaaagtaatgatgcgatttcactgaaaactcctaagggcaagactgtctattcggaagatggggaagaattatttgaaaaagtaaagaatcataggaattacaataatgttgtttttatggaaaatagcgtttattatttacggactgcaaatgaagatggctatcgaatttctgtgattttaaatgttgacgatcttttcaccttaattacccatttattacttgcaatcattattttaaatttaattgccatcatttgttcgattcctttaattaaacgtttttcaagaaaatggagtcagccactagagaaaatagatcaagatattgaggcaattgaacatcaaaccacggcaaaaaagaaagtattcgtgccgaaacaaccagcagaaattcaccacttagcacagtcttttaataaattgctagagtatcaagataaggcaattcagcgtgaacaacaatttgttactgatgcatctcatgaattgaagacgccgcttgctgcaatccgtggccacattaatttgattaaaagacgcggtaaagaacatcccgaaattgtcgcaaagtccctccaatatattgactctgaatcaagtaggatggaaatactggttaatgaacttttggaattaggacgagctaagaaacaacaccaatcaattgatcccattgatctagtgccaatagttcaaaaagagagtgaaattcttgaacaagaatatgatacttgcagcgtctatatttccagtccaataaaacttttttatccaattgaaattaaagattttcgcttaattgttcataatttgttagacaatgcggccaagtattcccaagacaatgccaaaataaaggtagaattgcaaaaagataatgggtacttaattttaagagttaaggatcagggaattggtattagaaaagaaaattatgataagatttttgatcgtttttatcgagaagatcaagctcactctagtcagattaaaggtactggaattggcttagctattgtaaaagatattgtcaccaagtatcatggaaaaattagtgtttcagctaatactcctaaaggggtgatttttgaaataaaattaccactctaatgattaaaatgaaaaaatcttcatttaatttatatctgctcttagttttttcatcctcgttttttcgtaaactaaatatataaagttaagcaataaaaaataaatttgaagaaaaagtgaggattctattatgagaacaaacattaagagattatcattaggcgcagctgttttaggtttagcccttggtggaactagtcttactttaattaatcaagctcaagcatctactggtggacaagctacggaacaaacacaaacttctaactcaatcaatctttctcaaagtgatgcaattaataaatttaatgaaaagtatggctcaaaatcaattaaggagattggactaaagaataagaaaaataaatatatttatgaagtagagggctttgattcagaaaaagaatataaagttaaaattgatgcaagtagtggcaaaattttaaaagctaagtcagaaaacttagatgcagatgataaagaagaggccttagatctaaatggcttaataagccgtagtgaagctacaaaacttgcccaaactaaggcatctggtaaggctgttaagtggtctttagaaatggatgatcagcaaccagtttggaaggttgaattaaaagatggcaataaagaaactgaagttaagattgatgctaaaagtcaaaaaatcttaaagactaagactgatgaagataagaaagatagtgaaaagaaggatcaagtagatcacaaagaaaatagttttagttaaaattcctggaaagccggaagactacactgatgatcaattggcatcccttcaaactttatcagatgtaatggtaactggttatcatgcatctttaaattgtgaggtaaagcctggttacaccgtagccgtaattggggatggcgctgttagtcttgccggtgtaattggtgccaagttattgggtactgaaaaaattattcttttatctcaccatgatgatcgtgcacaattaggtagagaatttggcgcaactgatactgtttctagtcgatacgaagaagctgttaaggatgtgctagccttaaccaaggaaaattctggagccgatgcagtcttagaatgtgttggtgcagaaagtgctattgaacaagctgatcaaattgctcgtcctggtgctgtgattggtagagtgggtgtaccacatgcagaacctaagtcaaaccaattattctggaagaatgtaggtttgcgtggtggtattgcttctacaactaaaccagataaagaagttttattacaagtagttcttgatggcaaaattaatccaggtaaggtatttaccaagagttttgatttagatcatattcaagatgcgtatgaagcaatgagtaatcgtgatgcaattaagtcattaataattgttaataataagtagaatcgcaaaagacaacttaaactttatgtttaggttgtcttttttgcatcttagttatcaattttagccacttagtaataagttattgaaaaatatttgtatgatagtaaaattaaaaccaaataaaaataatgagtgaataataaaacgaggtggctgaaatgtttttcaatacaagtgagaaaacgaagaatgaatatgttaatgaaattttaagtaacgatagttttactgatttgaaacttgatttaattgatctagacctaaaaattaaagcgggagatcattttgaagttcactatcgtggaccagtcgataagaaaccaagtttagtctttaatgaaaacttgcttgaaattaaagaacctaaggtagagcgtaaaccaggtaagttttggaaaaaagggattattgaaataaacatagttacagataaagacaggggagagttagtaattactgtgccagaagatcagcacttacacatgttaaatgcgagctcggtaagtggagattctagtttagaaaatttaaaattagaagctttaatggggtttgcagtaagtggagatttagatttgaagaaggtagaagttgaagatgctaaattaactactacatcgggagatattgattttattaatgtaatagtaaatcacggaaaagttaagttaacgagtggagattttaagatgaaaaatagtgaagtaggcgatgaacttagggtttcaactacttctggggatactttggttgaaaatactaaagtagctcaatatcaactctctactttaagtggggataattcactttttggaaaacgtggtgtagctgcacaaagaggggatgaacatgataaatccacccttattttaagtactctatcaggtgataatacagttagataataaaattgattttttaacaagaaaaaatataaaaaaattgttgacatttatgatgcttatattaaaataattattaacaaatttaattaatctgaaaacaaagagaaagaagagtagtttagtcttaatttacagcgagtctcgttaggtgtgaggagataaattctaaggttaaatgaaaatcactttcgagttctaattcttaatcttgagtaagaagaagtgggagcacccattatagtgctaacgtatcgccaagtaattggccgcacgtgaaaggtattgttagtgataacaatataaataaagggtggtaccacgctgaagcgtccctcaatcaaagtaatttggttgagggactttttttgtattcagatgtttattttctggagggaaagaatatgatgacagattatacatcacgtaaattaacatggaaggactatctcgtagttgcttctttgctattcggtttattctttggggctggtaacctaattttcccattacatttgggacaacttgctggagccaattggggaacagctgctgttggatttttaatcactggtgtattactgcctttattatcagtgttagcagttgcaattacccatgctgatggggtttatgatattggaaagcctttaggtgcaggatttgcagttgtatttatggttttaatccatgctacaattggacctttatttggtactccaagaacagccactgtttcatttacagtcggaatggcaccatttgttcctaagaacatgcaaggaacagccttattagtcttctctgctttattctttttagcagcctttgcattttcttaccatcaaaacaacatcttgtctaacgttggtaaagtattaaatccactatttttatctctattatttttagtattcgttgttgcttttgctcgtcctttgggtaacccacaaactgcagctgtaacaagtgcttacaagcatggagcattagttaacggattcttagaaggctataacacaatggatgctttagcaggtttagcatttggtattacagttgttactgctgttcgtggcatgggacaaaaagatgctaagagcgtatctaaagtagttgctaaatctggtttattggcagttttggctatcggctttatctatttattgttaatcttaatgggtgcaatgtcattaggtcgttttaaggtttccgataacggtggtgttgcatttaaccaaatcgttaatgtttatggcggtgtatttggtcaagccttacttgctttcttattaactgttacttgtttaactactgctgttggattagttgcagcttttgcacaagatttccataagcacttcccacaagtcagctaccatgcttggttggcacttagctgcttagcatcattcttagcagctaactttggattagacacaatcattgcttggtcaactccaatgttgatgttcttatacccattatcaatggtattaatcttattatctgttttttcaccattatttaaaacagatggagttgtttacttctttgtaatcctatttacagttgttcctgctttaggtgacatggtagttgcttttccaagcgttgtaagtcaaagctcatttggtttagctgttgcttctcttagaaataatttgccattagctaatatgggactttcatggctcgtaccagctttggttggtttagtagttggattagttgttcattttgttaaatctaaaaaagtagcttccgttttagaagaagattaaatatttagctctgctgaaaatcagcagagcttttttgataaataaataaagtttacttgttattagaatagggctaagaacttctaatcaaaagtcaagactaaaattatagctttaataggattaatattatctatatgttgtatgttagctagagctgataacactaaatatagaatgataaaaggtgaggatttacatggctacgttagaaattaaagatttacatgttgaagttgaggataaggataagaagagtagaaaaaagatccttaaaggcgtgaatttaagtctgaaaactggtgaaatccacgcaattatggggcctaatggaacaggaaaatctactttatctgaaacaattatgggaaatccccgctaccatgttactcaaggagatattctgttaaataatgaaagcattgttgaaatgcccgtagatgagcgagctcgtaaggggctatttctagcaatgcagtatccagcagaggtacctggtgtaactaatgcagaatttttacgtgctgcaattaatgctcgtcgaccaaaagatgatccaatatcagtgatgactttcttgaatgaattggataagaatcttgatttgttagatatgaatgaggccatgactgaacgatatcttaatgaaggattttcaggtggagaaaagaaacgtaatgaaattttacagatgctaatgattaaaccaagttttggaattttagatgaaattgattctggccttgatattgatgcattacgagtagtatcgcgtggagttaatgcaatgcgaggagataattttggtgctttaatgataacgcactatcaacgtttgcttgattacatcgtcccagatattgtacatgtcatgatggatggacgagttgtaaaagatggaggtcctgatttagctaagaagcttgaacaagagggatatgcaggtttacgtgacgaacttggcttagatattaaattagttgatgagaattaggagtgcttatgctaactaaagaaaatttgcttaatttttctcataaaaataatgagtcctcatggttaactgatttaagaattaaatcctttgaaagactagaagaactggattatcctaaaatgcagcgattttcttatcacgattggcctttaattaaaaaagaagattttccctggtctaatcaagctgacttttctttaaaagaggagcagaagcttttagaaaagaaaggcatcattttaaccgatatttttacagcaagtaaaaaatatcccgaacttgtgcagtcaactttagggtcagtaattaaacataatgaagataaattaactgcctatcattatgcctacttaaattctggacttttcctctatattcctaaagatactatcttaaccgaaccgattacaatttctttaagtccaactcaagatacctatatttctcaccttttaatcgttgccgataataatagtaaagtaaaatttttagaagaaattcaagataaggataaaaaagcaagttcagccagtttaatggtggagcttatagcacgtcctgggagtcatattgaattctcttcacttgatgaacttagccaagacacaacgctttactttaatcgtcgagcaaaaattgaaaaagacgcccatgttgaatgggcaattgcttttatgaacgattgcaatacactgggagatcttgattctgagttagttggggaaggaagctttgcggattctaaggccatcgcagttaccacaggagatcaaagagtgggcataaataaccgcgtaactaatcgtggtccgcactcaactggattaattaatcaacgtggggtcttactagaaaattccaggttgatcttcaatggaattggtcaaattgtgcatggtgcacatggctcaaaagctgatcaacaaaatagagtcctaatgatgtcggatgaagctcatggggatgctaatccattacttttaattgatgaaaatgacgttattgcagctcatgctgctagtgttggtccagttgataaagtccaaatgaactatttaatgagtcgaggaattccttacgatcaggcacaaagattagttatacgtggctttttaggtgcggttttagatgcaattccaaataaagatgttcgcagaaaaatgattgatattctagagagaaaactgatcgatggccaaattaaacactgaaaaaataaagcaggattttccaatttttaatcaaaagattaatgatgaaactcttgtttatctagataatgctgcaactagccaaataccgaagtttgttgaagaaaaagttagagattttaatgaaaaagaacgtgcaaatgtccatcgcggagtccatgcattaggcttaagagctactaatcaatatgaatcaagccgtcaaaaggtggctaattttattggcgcaaataatgctaaagaagttatttttacttctggatgtactgatagtttaaatttagttgcagctagcttcggtgaacaaaatattcaggcaggggatgagatcctagtctcaattatggaacatcatagtaatcttttgccttggcagcaacttgctaaaagaaaacaggctaagttaaattttattgaaataaattcagatggcttacttgatattaaaaatttaaaaagtaagatcaattcaaaaactaaaattgttgccttgacgcatgtaagcaatgttttgggcacaattaatccaattaaggagcttactgatctagctcatgaaaaaggagcaattgttgtagttgatggtgcacaagcagttggacattttccaattgatgtagctgaattaaatgtagatttctatgctttttctggccataaaatgtttgctccgacaggaattggtgttttatatgggaaaaaagatctcttagataaaatgcagccttatcgtttgggtggtgaaatgattgctaatgtaactagagaaggagcaacatgggcagaagtaccatataaatttgaagctggtacaccaaatattgctggtgccattggacttggagcagcaattgattatctgcagtctctagactttgagcttattcaaaaacatgaacaggaattgacaagttatgccttagaaaagcttaaaaatgtttcaggattaacaatctatggtccacaaaaaagtaatggtcgcattggagtaatatcttttaatttaaagaatattcatccccatgacttagcgactgcactagatttaaacggaattgaagttcgtgctggccatcattgtgctcagccgctaatggctagccttaatacggagtcaactgttcgagctagtttatctatttataatactaaagatgatattgataaattagtaagttctctccatgaagcaaaggagtttttcagtgagtttagataaattaagaagtttatataaagctgtaattttagatcatgctcaaatgccgcgaaattatggacaactaactgactttagtcatgaaactactgtatataatccaagttgcggtgataaaattcatctgacaattttgattgaaaataataaaattaaaaaaattgcttttaacggcgaagggtgcacaatcagtaaagcgtctgccagtatgatgacagacttggtaaaaggaaaaagtatcaaagaggcaattgagctttcacacctattttcaaacttagcagccgacaagaaaagcgacactttaaaattagaacaattaggagatgctcaagtattagtaaatattatgcaatttccggcccgaatcaaatgtgctactttagcatggtggggactagatcgagcattacttggtaaagaaaaggaagaagaaaatgactaaagcagaggatatagttaaagacgaagattatcagttcggctttcacgataatgtagaaccgaaattttcaactggtcgtggcttaacagaagaagtagttcgacaaatttcagcagaaaaacatgaacctaaatggatgttagattatcgtttaaaggcttttcatatttatgaaaaaatgccaatgccagattttggtcccgatctttcagggcttgatttagataatatgctgtattatcaaaaaatgaccgataaaaaatatcgtgattggaaggatgtaccacaagatattaaggatacttttgagcgacttggtgtaccgcaagcagagcgaaaatacttagcgggttcggctgcccaatatgaatcggaaatggtttatcataaaatgaaagaacaatttgataaactagggatcatcttcactgatacggatacagctttgcaggagtatcctgatttattcaaaaaatactttggtaagttagttccaattgattcaaataaattttctgccttaaactgtgctgtttggtcaggaggaacttttatttatgtgccaaaaggagtacaagttccaacaccagttcaggcatattttagattaaatgcagaaaattcaggccagtttgaaagaactttgatcattgttgatgaggacgcgcatcttgattatgttgaaggatgtactgctccgcaatactcttcagattctttacatgcggcagttgttgaagtaaatgtcttagataatgcatattgtcgttatactacaattcaaaactggtctgataacgtctatagtctagaaacaaagcgtgcagttgctggaaagcatgcaactatggaatgggtagacggtaatttaggtgcgaaagttaccatgaaatatccaagtgtctatttaaacggtgaaggtgctcgcggtactatgctttcaattgcagttgcccatcacggtattcaccaagattctggagctggaatgtttcataatgctcctaatacttctagctcaattgtgtccaagtcaattgctaagggcggtgggtcaacagattatcgcggtagtgttaagttttctaaaaaatcagatggctcaaaggctcatgtggaatgtgacacgattattatggatgatatgtcttcttctgatacgatcccaactaatgctattgaaaattcaaatgtagcgatggaacatgaagccacagtttctaaaatttctgaagaccagctgtattatttagaaagtcgtggcatcccagaaagaaaagcaactgaaatgattattatgggctttgttgaaccctttactaagcaattaccaatggaatatgcagtcgaacttaatcgcttgattagcttccaaatggaaggagcaattggatagtgctagaaatagagaaattatctaataccgaaaaggaagtttaccaagccttaaaaaaagtaattgatccagaacttcaggttaacatcgttgatttaggattaatttatggtattgaagtaagcgagacaaaatgtcagattacgatgactttaacgattatgggatgtcctctaagtgagtggttagatcacgaaattactaaagctgccaaaagtattgatgaagttgatgagtgccaaattaaactcgtttggtatccgcaatggaatccaagtatgatgtctagagtggcccggatgacccttggaattcatggataggggtaaagatggaagatcatagttttatttcatacgcaaatggtaaatctttagtagaaattaatagtactattccagttccgagaactcgtaatttcttcaggatgcttttagcatatactggtcctggtgcattagttgctgttggatacatggatccaggaaactgggcagcttcaattaatggtggtcagagttttaattatcttttgatttctactattttaatttctagtttaatggctatgcttttacaatatatggccgcaaaactaggaatcgttactcaaatggatctagcacaagccattcgtgcacgtactagtaaaagattaagttttatcctttggattataattgaactagcaattatggcaactgatgtagcggaagttattggagcggcaattgctttaaatcttttatttaagattcccctagttattgcaacttttatcactgtctttgatgtattactcttattgttattgtcaaaagtgggatttagaaaaatagaagccctggtatcctgcttgattatggtgatactactggtttttacttatcaagtcatgttagctaatcctaactggaaaaatatttttttgtctgcattgccatctccagaattagtagctcagcatcccgtagttaatggattatcacctttaacaggaagtttgggaataattggtgccactgtgatgccgcataatttttatttgcattcatctatttgccaaactagaaaaattaaccatgataatcttgcagatgttcaaaatgcagtccgttttactacgtgggattcaaatattcaattaattattgccttttttgttaatgtacttttattaattatgggagctgctgtttttaaaagtggtgcagtcaaagatagttcattctttggtttgtatgatgctctaagcaatacgactatgttaagcaatccaattttgatctcagtagctaagacaggaattttatcagtcttatttgcagttgcacttcttgcttctggtcaaaattcaacaattactggaactctcactggacaggtagtaatggaaggctttattcacttaaagatgccactatgggcaagacgattatttactagattattatctgtgattccagttattatgtgtgtattgatgacagcaaaagattcaatttctcagcaacattttgccctaaacatgcttttggaaaattctcaagtttttctagcatttgcagtaccattttcaattgtgccacttttaattatgacagatgataggagaatgatgggacaatttaagaatagaaagatttggtcgattctaggatgggccagttcaattattttgattttcttgaatttgtgtaatttaccagctacttttgtttcctttaatatgatgccaaaaagagatgcagtagttttcgcttacacgatcattatgttgattattttattaatgggctggacatgttgggatatgcgaaagaagaaatagttttaatatctttaataattgggttaatattaagagaataataatttaaatagatcggattaataaaaatgatttatcaaacttttgcccaattatatgatcagttgtttgattcagatatgtacaagagctgggagaaattcactttagctaatattaataaaaagaatggtaagctactcgacctagctggtggtagtggacgattagctgttttacttgctaaagatggtataaatgtcacggtagctgatttttctgatgaaatgcttagtttagcagatcaacatagtactgaaaataatgtttctttacagttggtgcaagctgatatgcgagatttaagtggccttgaaaaattcgatgtaattacttgctatgcggactcttcctgttatcttgatgacgaagctgacttgtttcaagtattttctgaggtcgccaatcatttaaaagatgatggtgtatttcttttcgatgtaattacacctcatcaaactgacgatatttacccaggctatatgtacaattatcaagatgatgatcatcgtcgagcatttatgtggcagagttatgccaatgatgatgtcgaacatggggtgatccatgatctaacattctttaatcgtctacccaatggcgaatatgatcgtttatctgaaactcactatgaaagagcatatgatttagataccattaaacagttattgaaacatgctggatttaactcaattgaagttggatctgactttagtctagaaatgaaagataaaaaggcaactcgctggttctttaagtgtcaaaaataataaaagtatccagggaaaaacattaaaataaagcactgataatcatcgttaaataaacgttgatatatcagtgcttttactttctaaagagttatgttttaaatcaaattaagacttgtttacgaaactctttttatgccgcatatgcggatttgtataaatctctagcggcattaatatcttgctcttgaatagaataataggatcctgccggatacattacagaagctatattagtatgttgtaagccaattgcatgacctaattcatcattatttgaaatatcaataaagacatttgctttagcatggttccaagtctggttgctggaagtctcttgattttgtccttcactaaaattagaagttactggctgatttggctattggttatctgattccgaggatagcgtctgatcagaaggtcgatcggaaactttaggtggaactatctttaatggattaagatcgctagcatctaaggttgatattttttcctttaatgtactaattgaatcgttagtagccatgtgaacagtaggattattcttataagtattaacacctacagaaacaagacctaatagaagaaagagcttaatcgtttttctgacacttctcatgtaactgttatcacctccattcgacaacaagtttatttgggagatgtgaataattaatggtgaaatagttatatatttttagtgaaagttaactttttcttagtaagtagtaaaaaatactatgcacttagcgtatgagaataaaggttacttcatgttctatttttttatttaaagttgcatataagacaagttaaaggaatttattgcattttaagactacaatagaaagtgaaaacatttttgagaagagaaggaaactaagatgtgtacatcaattttatatagtccaaaagataattattttggtagaaatttagattatgaaattgcctatggtcagaaagtggtaattactcctagaaattatcaacttaattaccgacatttaccaacacaagatactcattatgcaatgatcggtgtttcagtagtcgccaatgactatccattatattgtgatgctatcaatgaaaagggactagggatagccggattaaatttcactggtcctggtaaatatttttctgtagatgaaagtaaaaagaatgttacttcttttgaactgatcccatatttactaagtaattgcgaaactatcgaagatgtaaagaaattattatctgaaactaatattactgatgaaagtttctctaaagatttaccagttactactcttcattggttaatgggtgataaaagtggtaagagtatagtcattgaatcaacagaaactggcttacacgtttatgacaacccagttaatactttaacaaataatcctgtctttccagctcaagttgaaaccttggctaactttgcttcagtttctccagctcaacctaagaatacccttgtacctaatgcagatattaatctgtatagccgtggattagggacccatcatttaccaggcggaacagattcaaattctcgctttattaaggcatcttttgtattagctcattctccaaaaggtaatgatgaagtcgaaaatgtaactaatttcttccatgtcttacattcagttgaacaagcaaagggtacagatgaagttgaagataatgtatttgaatttaccatgtattcagactgtatgaatttggataaaggaattttatactttactacttacgataataaccaaattaatgctgtggatatgaataatgaagatttaggtacttctgacttgatcacttatgaattatttaaggatcaagccattaaatttgaaaattaaaagttagtttaaaataatttagtagtaaattttgacaaagtaaaacgggtgaagttgattggctccacccgttttgatttgttatttagggttgataagattttatctttcacaagtttaaacctaaaaaattctagatgaattttaaaatttatctaaaatcatctcttgttcaacacatttatcgaagtagggcaataaaaagctaacatagccataaccattcggtttaataatttggtcatcaattaatttccggcgatagacagcaatgtaattaggtcctttttccataagattaccaataacctgacttttaaccttgtgttgcttagatttaaccatagcttgtacgaattctttttcacgttcagacatgtcactataaactttgaagtaaacatttctatttaattcactaatatagatgtctaagatgttgtttatatcagatatagaaatcgtcttattggaggaatgaatgatttcttcccacaaatgatagcccaataattgaaaagcgtaagcaaatccttgagtttgtttagtcatatataaaagagtttcagtagaaaacgtatagccagctttactaaaaatgtgctgataactattttttatactttcaatatctaaaggatttaagacaattcgattggcacgtaatagaaaggtaagaacatcatcattttggatttctgaaacattttctggtaaaccggccataagcaaagaaacattaagattgtttcgaatcataatttgataacaactagcaaacttttttaataatggagttaaatggacttcatcaatgttaattaaaacatgaaacccttttttcgttagtttttctaaggcatcttggaataataattgaaaattagattcagcctgttgatggaaactagcactcatatctagtccaaagaagtttatctttaggtcgatatttttataatcttcaagttaagaagatgcctttgtaattgatttattagggagattaagagatcatcatctagaactaaattgattactaaccaatttttatatctacttattaaattagaaacttctgtcatcaatgtggtttttcccgaaccacgttgtccgtaaagaagggatgtttgaaaaggcaagcccactctatttaattcattaactatacgttgagttaatgagtcacgatttaagaaaacactgggcatttttccaaaactaggattaaaaggattttccatttagttacacctctttttataactttttataactttcgcttaattttataactttttataactttttttcagttcggaagaagttgttggagagaacgaataattctatattgtaagaaaaaactacacataatatatatgaaaacaaaagtttaacaactgagtaaaaagtttcctataatatatagatgtaaattatagaaatgataaagaaggaaataaaatggcagtcccaaaaaagattgaagttcgtggtggacgtgttcataacttgaagaatattaatgtagatatcccacttcataagtttgtggctatttcaggactttcggggtcaggaaagtcatccctggcaatggggattttatatgaagaagggtcgcgccgttacttggatgctctatctacctatatgcgtcgacggattaagcaaggtgcgcaagcggatgtaactagtgtaaaacatattccatctgccttagccttgcgccaaagaccaagtgttcctaatgaacgagcgactgttggaacaactactgaaacatataatgttttacggctaattttttcaagattaggttcaccggtttgtccgaatggacaccgagttgccccaagtttagatattgcagaagcaatgtctaagtccggagatgagatggggcaggttacttgtccaacttgtggtgtaaagtttcacgttccaagtgcggaagatttttcttttaattctgatggagcttgtgagcgttgcggtggaactggtaaggtacgccaattagacgaaagtaaattaattaccgatcccaatctttcgattagaaacggtgctgtagcttcttggaatttaccaggaaggaactttatgccaaatgtggctgaacatgcgggcgttagaattgacattccttataaggatttaactgagaaagagaaagattttgttttaaatggtcctgaaaagaagtaccagatggatttgttgtcaggaaccggtcgagtttttcataattttaatgctttatatgaaaatgcgcatcaagccgttttaaaatcagctgaaagtagtaaaagtgaacgagcacagaaacgtcttgcagaattttttacttattcaacttgtccggtttgtcatggaacgcgtcttcgtccagaactacttaatcagttagttaatggaaaaaatattgatcaagttcaacatatgcaactaggcgatttgcctaaatggagtaaagaagttctcgctagtctaccagaaaatatgcatcccatggctaaagccttactcaatgaatttattaataatttgcagccattactggatttaggattagattatttaaccatggcacgagctgggaataccttgtctactggtgaattacaaagaatccaacttgctagaactttacgtacagaaactaccggagttttatacgttttagatgaaccttcaattggattacatcctgctaatgttgatggattaattaaagtattgcgtaaattagttgcacaaggtaattcccttgtggtcgttgatcataatgttgatattataaaagcagctgatgaaattattgaaattggtcctggttctggtgaagctggaggagaaattttggatcaaggcactcctttagaaattgaaaaagatcctcaatctttaattgcaccttatttagatggcaaagctgatttaatggctcgtaaagttagcgataaagttaattctgagcaagttactttcgaagtagatcactattttaatttacatgatattaaagcaggcattcctgtaaatcaaattactgctgtaactggcttttcaggagcaggtaagactagtttgattttagattctattgttccagcaattaaggcccaagataaaggagagcctttaccaaagcaagttaaagaatttaattctccgatacatcatgttgtaagtgtggatgcttctccacttggaaagagtacgcgttcaacagtcgcaacttatacttcaattatggataatttgcgtaagctctttgctcagcaacctttagctaaagaaaagcactatactcccagttacttttcttataataataaagaaggagcttgtccaacttgtggtggtacaggaatcgttactttagatattcagtttttgcctgatatgcagcaaacctgtcctacttgccatggagatagatataatcaaaaaattcaaaaagttaaatggcatgatctttcgattgttgatgttcttaacctggatataaacgaagctattccaatttttaaagagattccaaaaattgaacgcgatctacttttattgaaagaagtaggtcttgattatttacacttaggagaaagtacaccaactttgtctggtggagaagcacagagattaaagttagtaacacacttaagtcaaagacaagacgataccttatttgtttttgatgaacctactattggtctgcaccccttagatgtaaaggtattagttcatgtaatgcaaaaacttcttgatcaaggcgcaacaattattactattacgcatgatcttaacttaatcgttaatactgactacatgcttgatttaggaccacgtggtggtgaaaatggaggaaagttagtggctaaaggtagaccattagaattaattaaagatccgcaaagcttgaccgtaaagtatttagcagattatgtcgatcagtttaaattaaataaaataaacagttaataagaagtcgccaatctaagaattgtagtgaccctcgaaattcggacacgaatttcggggggttcttataaccaaattatctaaagaagataaaaagtattatattgaagcctatatatttttcatccttgttaattagttaaaattgttaaataattttgtataataaagtggcaattcagtaaagtttgagaggatggaagcatagtatggaaaagttaaaagcaattcaatttaattttgaaaattgtgagtctgagcaaattccaattgagtatattccttattttaattttaaaaatgtatatactaacttaagccatcgctggggccatgaagaggaagatagtgatgtccttaaaacaggccttgaatgtgatgggtttactatgattgctgactgggataaagtaaataccattgaaacttcggaagaatataatttagctgaccggatagctaaatttcatgatttagttgatgtagatttgatttttaaatctggaaaagctaaaaatatttatatgccatgggaagatgcgaactatggtgaatctaacgctttaatgattgtcctaaagtctgattctagttcttatgttactaatagtaggttcaacaatagtacatttttagaagtttatatagagaaaaaggcgtaggccaatatctttttagatattaggcatgcgcctttttattagtctttgaatatggttaaaaatctattattttcgaataaatttttgatcactgcttggaataccattctcgtcagaaatataacgttctacacgcatatgaagatcatacttcttacgtaagtcggctaattcttgcatcattggtgaagcatggtgggcatcaagagattcttgatttttccagctatcaattagaagaatagtttcaggatcatctaatggaatgaaatattcatatttttcatttcctggttctttcctaatacggtcggctacaccgctgctttccatttcttcagcgaatttacgagcgcttctatttttaccagtgtagtaaagattaactgttaatgacatatctaatcctccttaattattcgtagtagttctttaaccattttatattaaattttaatcaagaaaaaagtgtttaccatcaagactttaaaatctggtaaacgctttttctataaactgattttgataaacattaatgcaattgttttaattcgtttaatactgcatcatagtttggctcatgtgtaatttcatcaactaattcacggtatagaattttcccattaggatcgaggacccaaacagaacgagcaagaataccggattcaggaattaataagccagttgccttaccaaatgaaaaatttttatcagacatcaattgcatatttttaacatcttcggcagcacaccaagtttgctggtcttcaaccgtattagttgaaatagtcaaaaagttaatttctggaaatttatccattgttttattaaaagttttggtttgaatactgcaaacaggagtattaatatctggtactacactaattaaactaaatttacctaacaaatcagacttagtgaattcttgattgttcttatttagtactgcaaaattaggcatttcttcaccaactgctggcggagtacctattaatttaacttctttacctttaaaagtgattttcataagttataccctctctttctttttattatcttaaatatagcaaattatagaaattatcttaaatatttagcctaggtagtaaaagaccataccttaaatgcatagatgtctagtagaaataactatttttaatttataaagggtggatataaaataatagatgagagaaataaagagtttgacggaggaaaaaataatggcaaaaaatgaagaagaagtaaaaaatagtgtctttggctttggtaaatttaatgaagcatacgcaaaatactttcaaggaaagagttttcttaatcctttagctacaagtaaagaggcaaaaactggtgtcagcaatgtaagttttgagcctggatgtcgcaacgattggcacatgcactcaattcctcaaatcctaattgccgttgcaggtgaaggttggtatcaagaagaaggtaaaccagcacagaagatggttcccggtgatgttgtaattgttaaccctaatactaaacactggcatggtgctaccaaggattcatggtttgctcatgtagcagtaatggtcggagagggtaaaactacatggcttgagccagtttctgatgaagaatatgacaagttaggttaaatttaatagagtttatattaatgaattaggtagataaaaagttaagtactgactgtagtacttaacttttttcgtaaacttgataatttctttaaagaatacttgaagtaaaatatttcgatttttttaagaaagtaaagaaattataaagacggttgaataataaaaaatagtcgtttaggctatagtcgttaattaaataaagaagcaaataaactgttaggtgagactcctacgtaaatatatgctgatgcccaggaacatccagagatgccaacgggtcaaacaggaactgtcgagttaagtcttttcccagtcagctagttgaaaaaactttacgttacgtagtgttaaaactgaacgacgagtattaaatcgctattataagaccaatgcagtttttgcgttggtctttttgtttgtttgccgattttttagagggagagattactatgttaaaattcaactctaaagatcgtgtagtaactgatgcgactttagctaagcaaattgctggaaaagaaaagagtgaagtattaaagcaattagatacgtcaattaatgggttaaaccctgcgcaagcaaaaaagcgtttagagcgcgatgggttaaatgaagtatcaaataaagagtgtcatccaaaattgcattttttatttgatgctttcatgactccatttacaggagtattactgtttttagctcttttatcttttttgactaactatctttttgttcctgcagatcaaaaggatctcagtacagtcattattatgattacaatggttttaatttctggaataactagttttatccaaaacgttaaaaccagtgacgcagttgattcactattaaatatggtatctgtaactacgaatatcaaacgagatggaaaagatcaggaattgccaactaaagatgttgtagttggtgatatcatcaatctaactgctggagatctagtaccagcagatctgtatttattaaaaagtaaggatctcttttgttcagcaagttcattaaatggtgaatctagtcctgttgaaaaactagcagatgaaaagccaaaggaaaatgataactatctagattatccgaatattttatatgagggaacaaatattgtttcaggctctgcaatgggtgttgtatttgctacaggtgatgagacagtttttggtaatttagcacgtactcttagcaagaataaaaataaagaaacaacttttgatattggaatcaaaaatgtttcaaagattttattgattatgaccgctgtaattgcacctcttgtgtttttaattaatggtctgaccaaaggtgattggcttaatgcattgatttttgctattgctacagctgtgggactaactccagaaatgcttcctgtaattgttacaagcaatctagttaagggatcagttgaaatggcaaggcacgaaaccattgttaaaagaatgaattcaattcaaaactttggctccgctgatattctttgcacagataaaactggaactttaacacaagacaaagtagttttagagcgtcactatgatttgaatttagaagaaaaatcaaaagtcttagaactatcatatttgaacagttactatcaaacagggatgaaagacttaattgataaggcgatcattgatgcagctaaaggtgaattagatacaaatgacattaatcaaaattatcaaaaaattgatgagattccctttgactttaaaagaagacgaatgagtgtagtggtaatgaataagaagcatgaacacttattagtaacaaaaggggctgctgaagaaatgcttgcttgttctaaccggttagaaattaatggtgaaattagggctcttaatcaagagcaaagacaagaaattttaaataagatcaatcaaatgaaccaagatgggttacgggtggtattgctagcctataagaaaaatcctgctcctgttggtgaattcagtgttgatgatgagaaagaactaattttaactggatttttagcatttttagatccaccaaaggatagtgctaaagctgcattaactgctttaaagagggatggaattactgtaaaaatcttaactggagataatgaagctgtcactagaaatgttggcaaacaagttgggttagatattgcttgcgtgtatcagggaaaggacttagaaaataaaagttcagctgaattgaagaaaatggttgaagaatgtgatgtttttgtaaaactatctcctcaacaaaaggcacaaattattcaattattaagagaaaataaccatactgttgcttatatgggagacggaattaatgatgcgccggctatgaaagcggctgatgttgctatttccgttgatacagccatagacattgctaaaaaatctgctgatataattttgttacacaaagacctaatgattttagagaaaggtgttcaaattggtcggcaagtctttggaaatacgatgaaatatattaaaattacgctttcatctaattttggtaatattttatcaattttagtagcatcctcatttcttccttttcttccaatgcttccagttcaacttctcattttagatttaatgtacggtaccagctgtctatcaattccattcgatacaatgaacaaacattatttatctgaaccaagaaagtggagtactaagaagcttcctaagtttatgttctattttggtcctacatcttcgatttttgacatcataacttttgcattactgttctttatagtttgtccacaaattatcggaagtagctatgcaggagcaactgcttcacaaaaattacttttttcagctgtcttttgtactggctggtttattgaatcgctttggacccaagaaatggttattcatgcacttagagatccaggcctcccatttattaaacagcatgctacagcaattgttacatgggcaacgattggtatggctgcaattgggactatgttaccatttattattcctgtcgcaaaagcagtgaaatttggtccaattccagtatattttttaggaattgtatttattttattgattttatacattgctttaacgatgttagtaaagaaatggtatctaaaatcagagaaatatttaatctaattgttttaatattaaatctatttttaaaggaagtatgatttactacatacttccttttgttttattgtggcatattttataattaggtatctaacagtatacattctaactattaacaaaggggttaaaagatgacagataaagtagaaaaatatcaagaaatgatggatttattccgtttatacttcaacttttctaaaagattttatggggaagaagtaaaatttagtcaacttactcctcaacaaggacgaactttaatgtatattcaagcgcatcccggtatgattcagcgagaactagctgataattttcacttacgtaatgccagtgtaactaatatgttgaaaaatcttgaacgtgatggatatattcaacgcaaacaagatgaaaagtctgcccgaattaaacgaatttatcttacccacttaggcgaaaaacaagttattgagatgaaaaaaagttttaacttgatattaaaaaaactttctagtcgagtagacgaaaagctattagatcaattaataccactcctgaaggaactaaaccaacaagttcgaaataattagtgacttgacagttaggtatctacatgttttaatactaagcgtcaatcattattaggtacctaactattaaggaggaatttattaatggatagaggaagaccccggattgaaaaaggaaaacatagttttagttttcaagatttttttaaattaataaatcgagtgcatcccaaatattggcaattaattgttggtattctggctggcttaattgccacgggagcaaacttaattgttcctcaatttgcacaaagaattattaataactttaagcatttaaatataaacctggtaattattactggaatagtattttttggtggagtaattattagtgccttatctggttatattttgggagtttttggagagcatgtggtttcgaaacttcgtgataatctctgggctcgcttacttaagatgccagttagttattttgataatacttcgacaggtgaaatttcatcaagactagttaatgacacgtcacaagtcaagaatttacttgctaataccttgccgaatgcaattacttctttattacaattctttggtgctgtcgtcatcatgtttatgatggattggcagatgtccttaatcatggttcttgctgttcctttagtgatatttgtcctactaccatttatgagattgtcaggaaaaattggccgggcacgtcaagatgaactggcaaaattttctagtgattcaactaatgttttaagtgagatccgtttggtaaaatcaagtaattcagagaagaaagagcttgctacaggaacaaaaagaattgctaaactttatgcaattggggtaaaggaatcctggattaactccttgatgcagccaatttctaatatgttaatgatgattttagtaattggtattttaacttacggtgctattcgtgtcatgcaaggtacacttactatgggtgcacttatttccttcttaatgtatctatttcaattgatgggtccagtaatcataattagtcaatttttcaatgaattagctaagacgtcaggttcaactgaacgtatcggcgaaatgcttaatgaaccaattgaagtatctgccgataatcaaaaggttgatattgctggaaaagaattgaagttgcagaatgtaagtttctcatatgaaaaaggaaagcaaattctacatgatatcaatgtgtcggcgaagcctaatactgttgtcgcatttgctggtccatcaggtggtggaaaatcaacaattttttcattaatagaacggttctataaaccaacttcgggaaagataactattggtggtcaaaatatagaagagattgatttaactgattggcgtaaacaaattggacttgtaggtcaaaattcatcagtaatgccaggaactattcgcgaaaatcttgtttatggactaggaagaaaagttagtgacgatgaattatggcatgttttaaagatggcatatgcagataaatttgtaaaagaggcagaagatggcttagaaacacagattggtgaacgaggcgtgaagctatcaggtggacaaagacagagaattgcaattgccagagcttttttacgtgatcctaaaatcttaatgcttgatgaggctactgcaagtcttgattcagaatctgaagctatggtacaaaaagctttagcaagtttgatgaaaaacagaatgactttagtaatcgcacaccggctaagtacaattgttgatgcagataaaatttattttattgaccatggaactgtttccggctcaggtactcatgatgaactagtaaaatcgacacccctttatgcagaatacgttcataatcaatttaaaaaatagtagataaaaatagcggcttttaagtcgctattttttgtataaattaaaataagagttttatttattcttttaggatatgattatcatatggaagtaaaatagtgaattaacatagaggtaattatgaaacatttaacgttaaataacggtgttaaaatcccgatttttggctttggaacttacgagattagcccagaccaaacaaaagaagctgttttatctgcttttaaagatggctaccgtttaattgatacagcacaatattatcaaaatgaacagcaggtaggggaagcagtccgcgcaagtaatcttaatcgggatgaagttttcattactacaaagaccatgactgatggatatgaagcgactaagcagggactagatgaatctctaaataaaagtggcttagattattttgatttagtcttaattcattggccaatgggccacgatttagatacttggcgcgctctagaagaagcatataaagctggtaaaacgcgagctattggtatcagtaattttaatagtcgacaaactttagaattaattaatcatgcagaaattcggcccatggttgatcagattgaaacacatcttttattacaacaatggaaaatgcacgaatttttgaaaaaagaaaatattattcatgaaagctatagtcccttaggtaacggtcaacaaaatctgatgactaatccagtgttacaaaaaattggtgaaaaatatggtaaatcaccaatccaagtgattttacggtatttagtccagaatgacattgtaactattcctcgttctactaatccagctcatattaaagctaatattgatatctttgattttgagttagataaagaagatcttaagcaactttgtgctttagacgagcgtaagccaattgatggctggccagcagaaatgagagaagatgaggattattaagtcatagaacataacataaaagagtaattgtattcccatagatagaatgaggtagacaattactctttttcactattcatttaattattaagcgagtctcgtaatttttctaaaaataagtttcctaaattagatagctttcgattcttcttcccgataacgatattaggatcagtaattttgggagaaagagggcgagcagttaaaccctctagtttcttatcatataaattattgtaagaaatttgaacgctatgaccttcaccagctaaaagagacgcagtataagctaaattactgtttgcaaccgttaaatcagttggggtaatcttacaatcggacaaagtgtttaaaatgatttgagtagagcttggggttatataaatttgttttgaactaataattgtgataataatagataaaacttaacactttactataagtaagaaggtcgattttatgcctatcaaaaagccactagcagatttgatccggcccaaaaatttatcgcaatttgtaggtcaaactaagctaatttctgaaggaaagcccctttatcaaattatcaaaaatcatgttccaatttcgctcttattatggggtccgcctggaacaggaaaaactagtctagcgcaaattatcgctcgagagtatgactatccgttagccacttttaatgcttcggttgataataaagcaaagctgatgcaaatcattaatacttatccataccaatcgtttgttctactaattgatgaaattcatcgcatgacgacaacactgcaggattatcttctgccttatttagagaacgggcaaattcttttaattggcgcaactactgaaaatccgattatgtcaattgttcctgctgtccgctcacgttgtcagatttttgaatttgagactttagatgataaggatattagtcatgttttgattcgtgctctaaaagaagtattccatttagaagaaaagcaaatagataaagaagcaattaacattattgctcgctcggctgatggagatttgcgtgtagcattaaatctattagaaactattcatgcaattaatggtgacgagatttcaattgaaagtgttaaggaatttgtaaaaggtcaacattttgcttatgacagaaaagcaactaagcattatgattatttagcagcttattcagattcaatggctgggtccgatactgatgcagccttgtattatcttaccgtcttacttaaaaacggagatctaccgtcagtagtgcggcgtctgcgagaaattccatacacatacgttggcttagccaatccagaacaagtaacgcaaatagtagttgcagctaatcaagcagaaaaaatagggatgccaaaggcaaaatatcctttgatgtttgcaactatgttaatgtgtttgtcccctaagtcaggtgcttttgatgaaatttgggaaaagcttgataaagatactactcatcctaatgagcatcccatgccacgtggattacgagatatgcattacaaacattcagaagaaataacgggtggtgggttgatagataatccatttacacaaccatttcaaattgcaaaacaaaattacatgccgaaaggtcttgaaggtaaaagatattactttgcaaaagataatgttaatgagaaaaagctagagcaacaatatttgaaacttcataaatatatttatggtaaggaatatggagagtaggtcattttaataattatgctaaaatgaaggtgaaagagaaaagaaggtaatatgatgaaaatagatgcatttgctcatattttaacgcctgatttttatcagaccatgttaaaaattgatgctacaattccacaaaaatatccttttataaagatagaaactctagttgatttaaatcaaagaatagctaattggccggataaaaatactaagcaggtaatttcatttgctaatatcaatccagaagactttgtagatggggagaaagctagtcaaattgcacaagaagcaaatcaggaactgtctgtgattgtagcttcttatcctgattattttgaagcgggagtagggatgctagcgctaaataacgttcctgcttccctcgaaatcttagaaaagattaaagctgataaaaatttagttggtgcacagatttttactcgtcatttaggtaaaagtattgctgatcctgaatttgaaccaattttattgaaagcagctgaactgcatcttcctttatggttacatcccgtttttgataatcgaaaaccagataataatctagtattttcttgggaatatgaactatcgcaggctatgttacaactggttcaaagtaatatctttaagaaagctcccaacttgaaaattttagttcaccatgcaggtgctatggttccattctttagtggtagaattaatcacattttagatccagaacatgctgagatgtttaagaatttttatgttgatacggctattttaggtaatacgccagctttgcaattaacaatagattattttggtattaatcatgtcttgtttggaactgatgctccgtttgcagttatgccagcaggagctgatgagattgtatctaatgcaattgaaaatttagatatctcggatttatatgataaaaagatctttgaaactaattattatcatatgcttgagagacaataagggagagagtgagtattatgaatgcaaatgaaaaaattatcgcactagttaagcctgaatatttaaataaaatacctaagatttttcgtaagcacgcaactgaaaatacttgtaaattaattgctaaggagcatccggatttatataaagcttttgaagaaaaagctagtgcagaagaaaaagaagaaatgaaaaaaatagtgaacggtattttcgaagaacgaatgaaaaaacataaaatgttgtaaaaaagcaatcttcagcattcatgctgttgattgctttttttgtgcataaaataatagctcatatttctattcatgcttactaagtgatacattaaaaatgaaagaatataggtagattggaggacttaatatgtataatttcgatcaagaaccagagcggcgtcacttagttgacgaatctggactaaatagctttttaagtaaaatttacggctatatggctctcgctgtttttgtatctgctctgagtgcttacttaacgatgactgtatttgctagtcaaatggtttctttaatggttcatcatccctggacgatgtggcttttattattaattccaattgttttaacatttgcaattaattttcaagctacgagaaatccagtagcaagttttattttattgatgattacagcgattgtttatggcgtaacttttgcttttattgcaggcacatatactgggcaagatattgcttctgcttttatcgcatctgcaacggtcttcgtagtcatggccattttaggtacagttactaagaaagatctaagtaggtggggctcctatgcgtcagcagcattaattggtttaattgtagcgatgttaatcaatatgtttttaaagagttcagcagctaattacatcttttcattcattgcagttattatcttcactgttttaactgcttgggatgcacaaagaatgaagaacatctatttacaatttggtggtgagcttcctactaatggattagctattgtgggagcacttcagttatatctagactttgttaacttgtttttgcagtttttaactatttttggttcaaatgataataataattaaaaatctttgtttatagtatttacgatattagcgatatattaattcatctatattttaatagactagaattatcctttgagtaggataactgaaagcttattgagagatttatcagtaaataaaagcccatgttttacacgggcttttttgttgatcgatagttgtctaattggtctgattgagctaaaaataatatgaaaagataaaaaagaatatgaaatattaattttatttattaatgcttttattattttgtgctaatattatactaaaataaattttaaggaagttgtaccaatgaatctaacatatcttaaatccaacttgttaattgtcttaaaatcaaagaaaaaccaacttcttattgttattcttgtcctattttccactttttctttatttatagtcgaaaatcaaaaaataggagatggaacaaaaagttgggaaacttatagcgaatccttgcaggcgaatgctaattattttgacagtgaaatgctaaaaaaatctacttataagaatacctatgacaatttaaataaacaagctcaggaattagctagtttacaaaatagtcaagtatttaccgatcctgtgcaatatttaaacagctatcgcaatttgctaactactatgcaagcaggctatacgaaccactatgctggagctaatacattaaatgtgccatcgcaattttttattagcaaggaattgaatcggattaattatttaattaagcataagattccgattgtaatgaataatgaaagttcagcaacatatttaatttatgttttatcatttttaggtactattatcttcttttatatttctttcatctcggctgatagctggattattaacttgaagcatcaatcagtcttaaaaaatattccttatttctttaaagacgagataattggaaagattggcattaactttatcttagttttctcatcagtattactctctataattggagcttatgtatttgctggtataaaacataattttgttactttaaactatccggttaatttttattttactcatgcacttactatacctttatggcgttattgccttgtctttttagcatatatttctggattagttatttttgttacaagtttaagtatgtttttaaatcagataactaagaacatttatttaactatcttcatcgaaggcagtatttacgctttattatttttaccaaaatatattttgaagtggcttgtatttttaccatcgccatatttagatttaaccaatctatttaatggagaccttgcaagtaatttgcatttaaccaatgttaattttctgactggctacttagtacttctgatctggtcattgattttgatttatggatttaagtatctaggggagaggaagggatgaaaatgaagaaacaatattttatttttcaactaaaatgctttttcactaatcctaaaaatattggtttatttgttttaacttttattctttctttatattttggcttagttagcgtacctaatcggcaaataattgaaaaagttgatccttatgcaattaagggagaataccaacgatataatttattcttgaaaaaagcagtaacaaaaataaatgaaatgcagaaatcaaaaaatgcacatgaggtgccgaatgaaggatatgttaatgctctaaaaacttatcctgctattctaaaatttgataaacatcgtcttcatggaattaagacaaataattggagagaatatgctatttactcaagcaggtggtataaagatgttgatcatttgatttttgtagatgagaatgaacaatttctatatcccgttcagtattaccaaaataataattatagggaggatgggcactttggttatcaaagaacagcccatttatatgacgctctagttaaaagcaaacagccacttactaggaatactatcgaggaaagaactactttacaaatattgcaaaattctatatcaggttggacagctctaatattaattattattgtgatattttttgcagcggatattgtacctaacgatcgtaagaacaaatcggtcttaaaaaatattcccttaagtaaaaattctatcctttggattaaaaccctggtagttgaaataggcgtagggataaattttttactagctttagtggtaattactttatgtacagctccaaaatacggctttggttcatttaatttgagaacgactttttatacgggaagattgtattttttacagccttttaaatatccaaccttaggagaatattttgggcagtttgggatttttgccattttaattgtttttttgtttattaggctcacgattttattttctataatttttagaaatgaatatattgctgaaatattagcaactatatttgcaattagtggaaaagttttctatttttctttaggaatgggatatgtatatccatttttacaaaatctaccaatgacatatttctctattggagaaagtttaactggaaatttagcatatttaatggattctccaggatggggatttgtagcaggactttatcctcttatttttgccattttaatagttgaaatttgtatgataatgattagtcattcaaatagagtttcattagtaaagggatgaaattaaatgcttaaattaaaaaatattaccttatcttttggtaatcatactgtcttagatgattttaattataattttcaaaatggaacaatttatggtttagttgcaccaaatggcacaggaaaatcgactttgatcaatgttatattgaacaatctgaaacctcaaaagggatacgtagaatataacgaattacagtataagaacgaaaagacaatagttaaattgcatcaagaaatttgcgcttttcctgaccaaagtgaacttttttcttttatgactgggagagatcatttaaaactttatgctaacttatggcataataatccgcagaaagtaaaagatattatttcaaccttaaaaatggaaacttatattgatcgtaaagtagaaacctattcactagggatgaaacaacgtttatgttttgcaatggtggtggctaccaatacgtcagtcatgcttttagatgaagtaatgaatggattagatccccaaaacgttcagttaatttcacaggtattgttaaatttgcgagcacaaggtaagttaataattatggcctcacatttgttgcaaaatttacagcaatatgcagatcaaattttatttttaaagaatggtagaataattaaaaatctaaacaataaagctgaaacaaaaaaatatctagaatttcatgattcaagtttgattaacgatattctcgaagaaagtaattatcaaattctacctaatcaaacgattcttttaccaattgatgaattaagtcaagataaatttgactcaataattcatatactacttgaaaataacgtttcatttactgttaggaaaatttcactagaagacttatttaacaagttttatgagtagcttagccattatttcactggcaaaatcaaagataatgaaaaataagctctattagtttatttattgcatttttagacttagaatgaaggagaatgagtagaaaagggaggacttataaatgacagaagttccaactattacattaaatgatggcaataaaatgcctttacttggtttaggcgtcttccaaataccagatcatgaaaaagcaagacaaacggttgagatggcgttagctaatggttatcggatgattgatactgcggaagtatatgaaaatcaaattgctgtaggtgaagcaattgcagagagtgcagttaatagagacgatattttcttaactacaaaaatttgggtttcaaacatgtcatttgaaaaagctactaaagcaattgatcatgacttaaaagaattaggaactgattatttagacttagtattacttcaccaaccatatggggatacattcggtgcctggaacgctttagctgctgctaagcgcgctggtaaagttcgttcaattggtttatcaaacttttatcctgatcaatacatgaacttagagcttgctcatgaagataagccagcaattaaccaaattgaaattaatccatggttccaacaaactaacgatgttaaattcttccaaggaagagatgtagtcgtagaagcttgggctcaatttgcagaaggtaaacatgatattttcaataataagacattgaaagaaattgctgatgctcaccacaagactactgctcaagttattttgcgttggcttacccaacaagatattgttgttattccaaaatctgttcatgaaaaacgtcaaaaagaaaatcttgatatttttgactttgaattaactaaagatgaaatggataagattaaaggattagataagggcgtaagtcaattctttgaccaccgtgacccagcagtaattgatgatattttcggagaaagcctaaagcaattacgtgattcagaatagtcagtaacattaagacaatagagatagatagaagcatggtttatgtttctatctatttttttattcactataatcttaatcccaaatatgatattttaaagataatcaaaaccataagaaagtaaggtgtaagaaatggaagaaaatactaaaaatatgctagcaggattaccttatcgtcccgacacagaagagttaagagctatttcgacaaaggcgcatcgcttaagccgtgactataatcaaacagcagatgaagataaggaagtaagaaaagcaattatcgataatttatttccagatcatggagaaggagtttacctgcaaggaccaattgaagtagattacggtaaatttacaaaattaggtaaaaatttttatgctaactttaatttgactattctagatacttgtccagttactattggcgacaatgtaatgtgtggtcctaatacttcattagtaacgccgctgcatcccttattgccagagcaaagaaatgcgcgcttgcaagcagatgggaagatagcagatattgaatatggcgcaccaattacaattggggataattgctggttagctagtaatgtaactgtttgtccaggagtaacgattggaaacaactgcgttattggagctggcagcgtagttacaaaagatattccagacaactctttagtttttggggttccaggccgagtagttagaaaaatcactgagaaagaccgcctagatacttatccatattaattaggtgctaaaattgcatcttgcgaacgtttgttcaaataaagtataatacttatgaaaaaagactgttgaggattttacctaaacagtcttttgttctgattatttatttttagcattcttttttagtaatccatgagactttttgtaccaataccataggccaaaaggaacgatattttcttcatggttaattaggcgcttgatattggagcggtgtcttacaaagagcaagatcatcataattcctgtaatgattgtaagaaagatatcatgaaaccagaaggaacaaatgaagatgataactattgaaaccaagcttgataaacttacatatgaagtaataaatagcattggtaaaaatactaaggcacatagtccaaagaattttaaattatagccaagaaagacaccggcgctagttgctaccgcttttccgcccttaaattttagaaagatggaaaaggtgtgacctagaatggcacaggcaccagcaattagtaataaatactttggtccctttaggtggaaaattaatggtaaatctgttgcaagtgtcccttttaatacatcaatgactaaaactgcactgcctgctacaggtcccattactctgaacgagttggttgtaccaatatttcctgatccaaaatttcttatatcttcatgaaaaaatatctttccgactaacacacctgtgggaaaggatccaatcaagtatgctaaaataaaaattagtaaataattcaacgtagacattcacttttcaaccccatttaaaatctaaagctattttaacaaagattataatagctgtggggttgattttgattgtctgttaaaaatggaggcatttatttggctaaagcaaataaaactaccagttcatatgatgattcttcgattcagattcttcatggactagaggcagtaagaaaacgtccaggaatgtatatcggttcaactgatcggcatgggttaaatcacttgatttatgaaatcgttgataactcagttgacgaagcaatggctggttatggtaaagaaatcaatgtaactattcataaagataactcagttacggttcaagattttggacgtggaatgccaacaggaatgcatgaatcaggaattccaactattgaagttatccttactgtgctacatgcaggtggtaagtttaccgaaaagaattatcaaacttctggtggtttacatggagtaggttcttctgttgtgaatgcattatcttcttatttaaaagtaagagtagtcagagacggtcaagcatatgaagaagaatttgaaaatggtggtcatccaattggtacgcttaagcatttaggtaagactaaggataaaaatggaaccactattacttttaaaccagatccaactattttttctactactacatataattacgaaaccattcaagaaagaattcgtgagtcagcgtttctattaaaaggtgttaagttcactctaactgatgaacgagaaccagaacatcatgatgaatttctgtatgaagacggaattaagtcctttgtatcttatttaaatgaagataaagacacaatgggagatgttttttacttctctggtaagcaaaatgggattgaagttgaattttcaggtcaatacaatgatggatattccgaaaactttgtttcatttgtaaataatgttcgtaccgctgatggtggtagtcatgaagctggagcacgcagtggatttacaaaggcttttaatgattatgctaaaaaacaaggtctattaaagaataaggataagggtctagaaggtagcgattaccgggaaggcttaagtgcagtattatctgttaagattccagaagaattactagaatttgaaggacaaactaaaggtaaactaggaactcctcaagctagaagtgttgtagacagtattgtttatgaacagctttcatactatttaatggaaaacggagaatttgctcaaagcttagttcagaaagcacaaaaagcaagggatgcacgtgaagctgctaaaaaggccagagatgaaagcagaagtggtaaaaagagacgaaagaaggagattctttcaggaaaattaactcctgctcaatcacgtaatccaaagaaaaatgagttattcctagtcgaaggggactcagccggtggttccgcaaaacaaggaagagatagaaagttccaagctattttgccattacgaggcaaggtcttaaatacgcaaaaagctaagttacaagatatctttaaaaatgaagaaatcaacaccatgatccatacgattggtgcaggtgttgggtcagattttcagattaaggatgcaaattacgataaaatcatcatcatgacagatgcggatactgatggtgcccatattcaaattttgcttttaactttcttttacagatatatgcgtccaatggttgaagcgggtcgtgtgtatattgctctgcctcctttatacaaattacaaaaaggtaacggagcaaaagccaagattaaatatgcttggactgatgaagaattgagcgaagactctaaagacatgggtaagggttttgctttgcagcgtttcaaaggtttaggggaaatgaatgctgatcaattatgggaaacaactatgaatcctgaaactcgtaccttaattagagttaagattgacgatgctcaacttgctgaaaagcgtgtaacaaccttaatgggagataaagtggctcctagaagaaaatggattgatgaaaacgttaaattccgtatgggtgaagacggatcaattctagaaacaagtagagattaagaggttatatttttaaatgacacaaacaaatgaaagaattagggaattacctcttgaagaagttatgggtgaaagatttggacgatattcaaaatatattatccaagaacgtgctctcccagatattcgagatggcttaaaaccagttcaacgtcgtattctttatgcgatgtataaagataataatacatatgataagccttataagaaggcggcaaaagctgtcggtaatgtcatgggtaactttcaccctcatggtgacagttctatttatggggctttggttcacttatcgcaagattggaaaatgcgtgaacctttaatcgaaatgcacggtaataatggatcgatggatggggatggtccagcagccatgcgttataccgaatctcgtttaagtaaaatttctaatttacttttacaagatattgataaagaaactgttcaaatgattttgaactttgatgatacagagtatgaaccaacagttttaccggcccactttcctaacttattagttaatggatcaacaggtatctcagctggatacgcaactgaaattccacctcataatcttgctgaggttattgaagcagctgtttatctgctaaagcatcccgatgctacaacagatgatttgatgaaatttgttaagggacctgattttccaacaggtggcattgtcctaggaactaagggcattaaagaggcctatgaaactggtcgtggaagaattcaagttaggtctaagactacaattcaagaaattaaaggccatcgtcagcaaatagttgtaaccgaagtacctttcggcgtaaataaagcaatgatggttaagaaaattgacgaaatccgtttaaataaggaaattgacggtatttcagaagtaagagatgaaactgatcgtcatggcctttcaattgtaatcgaacttaaaaagggtgctgatagtcaaaacatcttgaactatctatttaaaaacactgacttacaagtttcatacaatttcaatatggttgctattgatcgtatgactcccgtacaagttggattaaagcgtattttatcttcttatttagcacataaaaaagatgttgtaactaagagaacagaatttgatctaaagaaagctaaacagcgtctagaaatagttgaaggtcttattcatgccttagatattttagatcaagtaatcaagactattagatcttctaaagataaaaaagatgctaaaaagaatttaattgctaagtatgacttcactcctaatcaagcggaagctatagtttctttgcagttataccgtttaactaatactgatgttaaccaacttaaaaaggaacaagcagatttaaataaaaaaatcgaaaagttcaatgaaatattaagtgataataaggttcttgaaagagttgtagttaaagaattaaatgcggtaaaaagagaattcggttcaccaagaagaacagaaattactgctaaagcagctaaaattgaaattaatgaaaaagctctagtagctgatgaagatgtacgagtattagtaagtaaagacggctacttgaagcgttcatctcttcgttcattccaatcaaccgatgatgaagataatggattacctgctggtgataaggttgtgtttgaaaagacaatgtctaccttggataacctttatatttttactaataaaggaaatctaatttatcgtccggtacatgaattaattgaaacgaaatggaaagaaacggggcagcacctgtctcaagaaattggtcttgatagtgatgaagaaattattcgggtgtttgaagttaatgatttaaaggccaatttaaactttttgattgctaccaacgatggatacattaaacaagttacattagcagatttacaacctactagaacatataagtctcgtgcaattactgctattaagcttaagagtaatgacagtaaagttgtccgcattgatcaagttcaacctgatagtaagcaagaaataactctaattactaaccaagcatatgcagtaagatttgatattagtgagatacctacatccggctcaaaagcagttggtgttaaatccgttaaccttaaagatgatgactacatagtaaattatgttttagctgatcctaaatatattgatttaattaagattggaatcatcactcaacggggagcgtttaagcaactaaaacttagccttataaataaagttacgcgtgcaaaacgaggtgtccttgtactacgtgaacttaagactaagcctcatcgaattatggcaatcagtagttatggtgaaaatcatattctccatctgaatacttctagtgatcgtcatattgaacttaacacttctgaattcccattgggcgaccgctattcaaatggatcttttgtactagacccaatgacagatgggactcctgtctcgttaacgcttggccgaccaattgcagatggaagagataaaactgaagatttattttaattagttaaaaactaaggataatgattgaactgttatccttagtttttttattaaaataagaattataggaaaatagtatgcattttatgcaaaattttttattattattggcacaggtgttattataaaaagtgtgagatgaatattaagctttaataaaggactatcagaaaataattagttgtatttaaaaatcttattcattagctattattccagatttatataagaggtattcaattatgaaaacaaatactgatgcggttttatccgcgaaatcgttacgttactttcttcaattaattgataatatgagttatacgcaagcagctcaaattttaggtattactcagccggccttaacgcaacaaattaaaaagcttgaacgagcagttgggtcaccattatttggccaaatgggcaaaaaattatatttaactgatgctggcctaaagatggaagagacagcaaaagcactattttcaacagttaataatgctgtagacagtattcagcaatacactaaatcagataccggaactatttctttaggaatattatctactattgaagcaagagtaattgatcaattcttagttaaattcaaccataaatatcctgatataacattacatgtgggtttctataataggacagaactttgggatagactagataataatcaattagatttagcagttctttacatgccagatcataattcaactgtgaagaacatgaaacagtatatggcaaaacaaatttatcctgaagaagttattttcttaactcacgatccagaagatgagtttaataaaacaactcggcataaatgggttgcttatcctaaggactactacttaccacaaattgttcgtcgcttttatgctagtgagtttccaaacaatgaattaaatactacggtaacatttactgctccatatcaattaatcaaatttgctgagcaaaccgactataacacttatgtctccaagagtttttataaggcacacaaagctgaaattacattatctccagtaaagacaaaaagtgagacaaactttgagagttgttttatttatcgtaaaaataagagtgaaatacctcgactagtcaacttcttaaaagagtgggataagtttattgaagaaaaagattatgatagtagactagaggatattaaagttaatatttagttttaaggcattctttttatagcaaaaggatgcctttttgatgcgtgatagatttgcttaagtttaacttttaatctaaaataattaggtagatataattttaaaggagctctatataatggcaaaagaattgatttttggtcaccaaaatcctgatacagatgcaatcggaacagcaattgcatactcatacttacaaaataagttaggttacgacaccgaagctgttgctttaggtgaagctaatgatgaaactaagtatgctttaaataagtttggttttactgcacctcgtgttattaaaactgcttcaaatgaagttgatgcagtaatgcttgttgaccataacgaacctcaacagagtgtttctgacattgataaggttaaagtaactcatgtagttgatcaccaccgtattatgaacttcaatactgctgatcctttatactaccgtgcagctccagttggttgtaccagtaccattatgtggcaaatgtacaacgaaaaagaaattgaaattccacaagatattgcaggaattatgctttcagctattatctcagatactttactcttaaagtcaccaacaactactgaccaagataaagaagctgtagtatctttagcaaacattgctggtgttgactacaaagaatacggtcttaagatgcttaaagctggtactaatattgctgacaagtcagaagaagacctaattgatttagatgctaagagttttgaattaaacggtagcaacgttcgtgtagcacaaattaacgttgttgatttaccagaagccttagaacgtaaagacgctttcttaaaggctatggatgaagcttctaagcgtgaaggttacgatatgtttatgcttttaattaccaacatccttgactcagattcagaagctttagtagtaggtagtgatgaatcaaaagctaaatttgaaaaagcatttaacgctaaattatcagattcagaagttaaattaccaggcgttgtttcaagaaagaaacaagttgttcctccattaactaacgcttttgaagcttaattatttggtttaatttagaaaaagacaggtatgatcctttcatacttgtttttttatttagtagaggaaaatgaaatcatcaatagaagtactaaagaatgtttttggttatacaacttttcgtcctggacaagaacgagttattgagcaagttcttaaaggaagaaatgttttagctgtaatgccaactggagcaggaaagtcaatgtgttatcagataccagcattggttaaccctggtgtaacgttggtaatatctcctttaatttccttaatgaaggatcagatagactctctaaaacaaaatggcattaatgctgctgctttaaattcagcaactcctcaagaagaagtaaatccaatcttgagacaagcctatgaaggaaaaataaaacttttatacataactcctgagcgactagcaatggattattttcgctatcaattaaactttttggatatttctttagttgcagtagatgaagcccattgtatttctcaatggggccatgactttagacctgcgtatcgccaaattatggagggagtaaagtcaattaaaagccagcctaatattttagctttaacagcaactgcaacaccttcagttcagaaagatattgcagatcaattaaatattccggctgaaaattatgttattacttcatttgcaagaccaaatttgagcttcaaggtagtagataatcctaaaaatactaacttatatcttttagattatattaaaaagcatcccaatcaatcggggattgtgtatgcgagtacaagaaaaaatgttgaagagttgactgactatttagctcaaaatggaattttaacagcgagttatcatgctgggctatctaataaagaaagagccgatgtacaagatgcctttcaatttgataaggtccaagtgattgttgcaacaaatgcttttggtatgggaattgataaaagaaatgttcgatttgtaattcacgctaatagtactccaaacttagaatcatattatcaagaagccgggagagcaggcagagacggagagccatgtgaaggaatattaatttatcacccgaaagatattagactatatcgttggtttattgaacaatctgatttagatgatgaataccaaaaaattcaatatcagaaattagctgcaattactaagtacgtcaatacaacggaatgtttacaacaatttatcgtcagatattttggtcagacttgctctccatgtggcaaatgttctaattgtttgggaacatttattgaaaaagatattactgcagaaagcaaaaaaatcatttcaacaatttatgaacttgatggacgttttggcaaaaatgtagttgccgatgtagttacaggtgccaataatcagcgcatgcgagaaattcgggcatctaattttaaaaattatggtagtttgaagttaggaaagagagctgctttagatttaattaattatctactcagccataactacttggagttaacagatactcaatatcctgtagttcatgtaactaatttaggatgggacgttttagatgataaaaagcaagtaagtcaaaagatttcaaaaaatatcaggaaatcaatacaacttactaatcaaatttcagaaaaggaaaataacctattcttgcgtttaaaggaaacacgcttagaattagctaaagagcaggggataccggcattttatattttttcagataaatcattaagagatatggcacttcaaaaacctaaaacaaaaacagactttttgaatatttcaggtgttggtcaagcaaaactaaaagcatatgggcaaattatgcttgataccattagaaaatatttgaaagaagaaatagattaatgaagtgtctagtaataaatagtagaatagactagaacagattaaaaataggaggactaaaatggaatatccacaattagaccttgaaaatgtaaaaggtccaaaagcagtaattaaaactaatcatggagatattaaagttcaattatttgaaaaagatgctccaatgactgtagaaaattttgttcgtttagctaaaaagggttactatgataatactacttttcatcgtgtaattagtgactttatgatccaaggtggtgatccaaagggtgacggtactggcggtgagagtatctggggacatccttttgaagatgagttttcaaataaactctttaacttacgtggtgcactttccatggctaattctggtcctaatactaatggtagtcaattctttattgttcaaaataagaatgtgcctaaacgaatgattaaggaaatggatgcagctggctatccaaaagaaattgtaaaagcatataaacagggtggaaccccatggttagatggtcgtcatacagtttttggtcaagtaattgatggtatggatgtcgttgatgaaattgcaaaggttccacgtgataaggcaaatgataagcctaaagaagatgtaattattaagaacattcagattgaagattaattcggttaaaaacatggtctaccttgatcatgtttttaatttgggcttataacacgggggttaaatatgaatatatttactaatgataagtatcggccatcagaatcacgtattttagctacatccttaactttttcagctggttttattgatgcttatacttatattcaacgaggacatactttatctgcagggcaaacaggaaatgttatcttctttgcttcagcatttgcggatcacaatatagctggtatgttaaatagagcaactacatttattgcatttactttagggttattactggtaggtctttttcataaatacgtaaaaagtaattattggcgggtattttgtctatttccaattttacttatttgcttaggagtaggctttgttcctaaaactgttccgaattattatgtcgtgcccgtaattgcctttggactggctgttcaaaatgcttcctttagtaagatcgaaggtatggggtataataatgcatttacaactggtaatttaaaaaaatctgtcgttgcctggagtgcatatttctttggtgaagataaatctcagcataatgcagctgttaactacatgcttttagttattgcttttgcatttggagccattgtgtcagcattacttcaaaaagtatttctcttaaaaactatatggtttgcagtattacttctgggaactattaatattgtttatacaatttcattaagtaaacggaaaaaattaaatttcaaaaatgagtagtcgttaaaatttttagtacatgttttaaaatctcactaaatgaactgtgtattcagtggttcaatttggtgagatttttatttagaaaaaataagtggtaaagagaaaaggagctaataaatcataaaagcataaattcgtataatatatattatgtaaagtagtatataaaaattatagaatatatcaaaagtaccttgtttatatgtattatgttttaggcagttaaatctttatcaacatatctaaaataatttttctgggttaattagattcttactaactaaaaaatataagttaaggatttttattttgaatcttcactgtaagcttaagtaaaaatttttatagctatgtctatctcttatctataactttgtgatgctgtggcggccattctatggcttttaaaataattattggttagcagttaatcgatttgatttaaattttctgttatatgtcctatgcaaaatgtttgctattgccagagcttatttgtggatttaagctagttgtacaagtattctcagataaaagcttagataggataagtatattttatcttgaacttatgatattttgaaaataattgaaatataagggattgctagattttatagttcttactgaatatgattatggtaatacatagagtaataaattaggacaatattactcctggctggggcaataatacatgatttttcattaaaattacctttcattaaaattattgttttaatgaaaggtatagatgtatatcctataaaatatggatttttaattcattcaaatcgatctgttttttcttttaaagttaacttttaaaattttgttttgatcccaacagctacaaatttattttaaccatatgtaattcagtccgatatttaaatattttactatatcatttttgaactaatactttttattctcctttaatactcttattcagcttatgtttatctcctattttaaccttaacttctcatacattatagttaattttattattcatgctttgaaactacgcttatttacagcaataattgctttttacttaatgatttttcttaaataccctttatttatactaaaaatccgttctttttagattaatttattgttctgatcctgttagttgtaaattgatctaaattccatacgcgttataactaattaccagccttttccatagtatactagcttgtctcccctctctcctgctaggggacagtaacaaaactttttttaggtcaataaataagatataatattatacaaacctacgttcgaggagactataatttggaaactaataaatacttagaacttattaagcaagaattggctaatatgccagattttgtaaaggaatacaatctaggaacttctcattcattaactacaacctatcaatatttaactgaaattcgacgttttttcgactggctaagacaaaataatattgcttcagtttcttctaataaagagattgaagtaacgacgttggaaaatctacaaagaaatgatgttatgctgtacattcatcatcttaaacatactaaaaatcaacaaggtcgcttaaattcgccaactaccattaatcgttctattaatgctctacgctccctctataagttcttaacgattacttctgacaataatcatggtgaaccatattttgaccgtaatgtcatgttaaaaatcaattcattaaatgacactaagacattaaattatagagctcatgttttagagtcacatatgtatatgggagatttaaagtaccaattcttagattttattgaaaatgaatatatacataaatgtaataagcagtccctacctgcctttaaaaagaatcacgagcgagatatggcgattattgcattgattttaggaactggaattagagtttctgaatgtgttggcgtaaatatgcgtaatattaatttaaaagatgctatgctggatgttacacgcaaaggtggtcaaaaagatagtgttcccattgctgaatggacgattccttatttaaagaaatatagggaaatacgtgccgatcattatcatgctgaaaaagaagatattgctttctttttaactagatggcatggaaagactaaaaggataaccactaatgcagttgagaaaatggttaacaagtattctgcagcttttgggaaacctcttactccccataagttacgccatacgctagctagtgaactttatgaagtaactaaggatcaagtgttagtagcacagcaattgggtcagaaaggaacaacagctactgatttatatactcatgtagatcaaaaaaaacaaaaagcggcactaaataaaataaatagatataaatcttctgattaattcaactctaatctcattatttagcctataataaaagtgtatactttatgtaaaaaggaaggaacacttcatggaattaagagttttaagatattttcttgcggtttgtgaagcaaaaaatatatcaaaggcagctgaagctcttcatattagtcaaccatcgctttcacgccaattgaaaaatttagaggctgaacttggcgtaactttgttttatcgtggacatcaggaaattactcttactcaagaaggatattatcttcaggaacatgcagaagaaataatttctttgaccaataaaacacaacaaaatctaaaacgctctcaaattatatctggtgaattatacatcggagcaggagaaagtattgcaactaaacgtgtaatggatattatccatcaaattttacagaactatcctcaagtgaagattcacttctttaatggaaattcatccatgattgaaagcaagcttgagcgcggactattagactttggaattacaatgggccaatatgatactactcaaaattttaatagtctgacccttcctgaaattaatgaatatggtgtgattgtaagtaaaaatcacccattagctgatcattcctgtgttactgccgaagatttacaaaattatcctgtcattatgtcaaaacatacggctgattctgataactttagagattggtatactgagccacaaaagttaaatatcgtggctacatttaacttacctgataatttgcagtatctcgtagacaagggaccttattgcctattgatatataaagatttgcttcctttagataagagtaatttatgctttttaccacttgagcctaaaattattgaccataatcgtttgatttggagttcaagaaatcaactatcaaatgttgcaagtctatttcttaaactgatacgagattctataaaaagcaaaaattaatttatacataaaaaacgatttgaagatctaaaaaagattttcaaatcgttttttaattaatgactttgctgactagcagcagattgttggttgttttgtgctcgtccttgattattgtggttagtatctgagctgttgttactattattggcttgtgattgttgactagattctttattatcagaggattgggttgatgtactactttgactttgagaatgttgactttcctcgttatgttcttctgatttgctactttgcgatgaactagattgttggctactacttgaagaactttcacttgattgactagattgagtatttgaatttccagaatcaatatcaatatcaaaactatcatcagcttttggatggtatactctatgactcttctttgtggctgtcttagctctcaatgcttttggagtacttaccttaattgcattgatttctgtatatgtcccctcttgagaaatatcgtatccagcataagcaaaacgcaagtagaatgaaaagctcgtcaagactaagtggccgcccttttcttttaaggtatattcaacctttaaccttttaagtgctccctcattatctaatccagatgcattacctttaagctttttaattagcttactgtgggtcttattccagaactttagactattaccactgtagctaacgcgatagatagagccagatttcttaagtttcatatcacctttaattgctttacttccgcttaaaataattgctgggtcgaattggctaactactttattaggagtcatagtagaagaagctttccactttggactaccagtattatcccacattttttgatatactttgtcttcatttagccacatagatgtcttatcaactttagcttgtgccttaagtggatcattttgatattccccagtccaagttcttgtagcttgaattccgggtgaattctttacattaaatttatagcttttgaaatcggtattgagtgcttctgcaataatttctttgtcactactattacttgtagcagaattaacagcggtaggactactacttttaatagcacttgtgttcatagctaatataacttgaaaaacgattaccagtcctagaccaataccagcgactagtcctaatatttttaaaaacttatttttcatttaatcactctcgttttaagttcatgtaatttactttattaaaaaaataggaaagcaactttagctctcctatttttgatatgattattttttactaaagtccattttatctatgtctgccatccaagtaataccaagagatttttctcctaaataggtagcaattacggaactaaaattgaacattttaatggtcatattagggaaagcagcttgaaaatcatttttaaccttagtagcctgctctaaatcattagaattataaactgctaatgacaatttatccttaataggcgaattattaattcgctcaatagtgatattttcagccttcttaacagctctcttcatggaacgaactttatcaaaacttacgatttgataatcatcctttttaaatgttaaaagtggcttaatttgaagcatggtaccaataaaagcactcgcattactcaaacggccgccgcgcactaagttatttaaatcatctacaacgaaaagaacatcaattgtatctctaatttcgtctaacttagatagaatttctttaggttcccaaccatttttaatcattttagcagctgctagcactagatttcccattgaacgaacggtcattgctggatcataaggataaagattaaattcaggatgattatgagctaaagtaactaaactgttataaaagccagaaataccagatgttaagggaatagcaataatagcttcataaccttcatttttcaatttttggcataattcaagcatagtacccggactaggctgcgaagtcttaggaaaaggtgctccatcgcgttctagctcaaaaagcttctctgcagtaatatctaccccatccatgtattgcttatctccaataataaccggaataggtactactgtaatatcattggccttggcttcttctgggcttatatcactagtactatctgtaatgagtgctatcttcacgtgtgaaaacctaccttaaaattaaaatggcagcattaagttgcatgctgcaatactacttatcaaaatgaaattatatcataaaatccaacgttttttaaacataatcgatgatttatacttcatctgttacaaggttattaacaataatttgtaatttactatcaaaatcctgtattttttcttcactccaactagaaaaaatttgtgcttcaatttgagaaagaactttttttaattcttgggctttagctaatccttcattgtttaaatttaaagatttgctagaatccttctttgaacgttctactttaattaaagaagcagtttttttctgcttgatttgtctacttagggtcgaaagagatatacttaatgcctgtgctaattctcccatcgtcaaagtctcgttctgatgatgatcaaagaatagtaataagcgagtttgagagaggtttaatccacactttttattaatcactcgcttaatattctcactaacgctattaaatattaagacattcattttatttaccacctatacttaattttcccatttttctaatcaacaataattctaagacataatttaatttttcacaagattcgtgaaaaattaacaatattagtgaaaaaatcacatatatatttatcaaggaaattcaagagattaaagagtataattaaatatactgttttaaaggaggatatttatggcttttgatggtttatttattcatagtcttctgcaagatctctcccctactctggttggaggaaaacttactaaaatataccaaccatttgaacaagatttagttttaaatttcaggaaagatcgtaagaatcagcgtttgctgatttctgctaatgctcaaaatccacgcttttatattacaaatgatacaattgcaaatcctgacgttgctcctacttttgttatggttttgcggaaatatttagaaggatcagttcttcaaaaaatcgaacaaatcggtgttgagagaatagttaactttcatttttctaatcgaaatgaattaggagatgaaatgcagcttattttatcggtagaattgatgggacgacatagtaatgtgattttatataatgcggataataataaaattattgatttgcttaaaagaatcaatcctgatgaaaaccgcgcacgcttattacttccacatgcaccttatgaactgcctcctcttcttccaggaatcaatggctttgatctttgtgctgacaacttcaatgacttaaaggaaaagtatcctgaaccagcagattttgtaagacaatttaatggtttagacggagacgataaaaaagaatttactggttacttagaagacgatttttcatatagttctttacagacattttttaatcaatttaataggccaaaaggatatgtgctacagaccattaagcataaggatcgtgtatatacttacctaccatatcatctagaattaaatttgatttattctaatgacgatgtcaataaaacattagacgagttttatcgtgatcaggctaatcgtgaatgggtaaagcaaaaatctaaaagaattgaaaatattgttaataatgagcttaaaaaacttaaaaagaagattattaagttacgtaagcaattagatcaagccgagaattctgaagaatatcgaattaagggtgaattacttaatgcttatcttcatgaagtaaaggctgggatgacaagtattgatctaccaaattattatgaaaataataagcccttaaaaataaaacttgatcccgcactttcacctgctagaaatgcccaaaaatactttactcgttatcaaaaattacgtaattcaattaaacatgttaatgaacaaattaaattagcaaatgagaacttagattactttgattctatccaaactgcaattgataatgcggatccacaagatattgatgcaattagcgatgaattaattaatcaaggctatctaaaagagcaaaatcataatcgtcatcggaagaaaaagattagtgaaaaaaatttgaatacttttaaactaagtgatggtaaaaaagtattagttggtaaaaataattatcaaaatgattggctaactttaaagaaggcggataaacgtgattactggttccacgttaaaaatatgcccggttctcatgtcattttacaagatagtgccccaagtgatgaagatatcaaagaagcagctgaaattgctgcctatttctctaaaggaaagaattctagtcacgtcccagttgattatgtgcaagttaaaagaattaaaaagcctaatggagctaagccaggttttgtcatttatactggtcagaattcaatcgaagtcactcccaatgaaaaagatattttagaaaaaagaatatagaaaaaagcgttcatatcaaaatgagcgctttttctatagtctctaaatttacataataaataatatttaattttacaaaggctgagtagtcattgctaaagtttcaagtactattaaaacatcttgcgctgattgtaaactagaaaaaacaggaatatgtgtgcttaaagctgcatctttaatcataattgcatcatgactagcagagtcggataaactggttacattgattactagattaattcgatgctgctttatcttttcaagtaagctattgcttccctcttgaaccttttcaataattcctgttgttattccctcttcagctaatacatttgcagtaccttcagttgctaaaagcttaaaacctaactgatgaaaacgtgcagctattttaattgcattatgtttttcagaatctttaaccgaaataaagacagtaccatatgttgaaatcattaaatcactgccttcatatcctttaaacaaggcagtcggcaaatgcttggctcgtcccatcacactaccagaggtcttcatcttagaatcaaaggtattttcactactatatgataaataagaaaagacgggcattttaacgtgaattaagtcgtttgatggccaaatatcgcttggaagatctaattcagacaatgtacttcctaacaaaactttcattgttatagctgtaatatctttttttagtgctttagttagaaaagctacattgtgtccagagtaacttttaatttgtaataaatagatttgatcattagctagtaaaaagtgtaagttaactggtcctcttaaattaagtttagtggcaatactaattgcactatcacgtaatctacgctgatcattagttgataaattttgtggacgatagacagctatggagtcactggcatgtgagccggtctgttcaaagtgttcaataattccgggaatagtaacatttttaccatcagaaatagcagtcacttcatactttttaccttcaataaacttcgaaacattcatatgctctaatgaattttcagcaatatatctttgtaaagctggtaaatcaaagaccacagcagatttttgcttcttaccgttacttgtaccaccaattaaagctggaaaaccatttcttttaacaaaagctaaaatgctttcttcattgtcgcattgaagagctgggactggattaacgccggcctgatatacttcgtctgcatgatcttcccttagaatttccttcaaattaggctgacctaaaattgttagcccatgttctaagagtgaactgcgatattcattaatctgtttgccagaaaattgcgttaccacttctttgatattttctttccatgcaacttcaagaatattttctaaagtaattggttcaaagtaaattcgatcgcatacatcatacgctgcactcacactttctggattattactaataatcacaggactaattccttgctcttttaaggtcttggcagcatggtagagcatataatcaaattctccagttagagatacttgaaatggttttaatcctaaaagaaggcattttttcgaattagatagtggtattatttcatcttcaattccataactactgtaaacagcttgaatattaggatgaattaatccagctgttccatcaatttcaatatagctaggcttaattgaccattttttacataaatcagcaattgatttttcatctcgctgcgtaatttcagcaattaatcgattagaaaaaccatttttctttactttcagcattaaatcagctgtaagttcatcattacgtaatttctttaataaaatcaaaatatgattaaacttctgcaaaaatactaaatgaatatgtaaaagctggtgaagagtgtggtaattaattccctttgctatcgcggctaatagtgtaattaggtgtatttcattaggcttcgatagatcttgcaataattctttttcgctttttttatattcctttttaaaggtcttaacattattagaaaaaccagtagttgactggagagcctttaaaaatgcactttcaaagttacgaccaattcctagagcttggcctccggaagtggttttattattaagagtgtagtgattataaccagcttctgtgaaagaccaataaggtaattttacaaagcaagcatcttgcacgggatcaacagcagcagaaattccagattgtggatcggtaatttcatttaaattatagccaagtgcaattttggccgttacatatccaatagaatatacgccacttctataagaaagcaaactactctgagtcaaacggggcttaatacttaatactttaaaattaaagtcttccccactttgcttaacagcaaaatgaatactcaaagctccatgtaaattaagacaattagcaatctttcgacagcaatttcttaagcgctgaatttgattattatttctagttaaaattggcgtcactaataaagaatccgaagagttaataccaactggttctaaactgccaatatttcctacaaatacaaagtttccattattatcccgaacaatatcaaaaattaattcttcccaattcgataaatcttcagttaaacgataatctttccaattaaaatggtcatcggattcttcatctaagaagtattgttctaattgagctagattttctagagagatcatgctatcggggcgataatgctgcttttttgataaaagcaaaggaaaatgagcatgttcaattactcgccttaagtcctcttctttttctaacagccattgattggccaccgcaatcttatttgctttaagaaaactatagaaattatgaggagctgatagactcaatgccaagctgttaatagttagtaactcaatattcatttgggttaagatgcccgactctaataattcactggtaagttttaaagccggtttgcccccaaaagccggaataatagcatctggcttctccatccgaacgattcgcttcacaaaaggcaacgtcattggttcaagatatacatttacattaggatgcggatctgttgtgacggttgcaggattgggattaatcaatacaacttgtacgttactttcttcaaaagccgttaacgcttgtttagcaagaatatcaagttctgttacttctccaacaatacttggccccgctccaataacaagaactttattaatttcattatgtaaaggcatagtctactccatcatattcaaaaactgatcataaatgctggctgcatcaaaattacctggtgagccttctggattaaaggcagttgctaaaactttatcttttttgatactgtagcctgctaataactccgatcttaaatcaaaatatttacgtgaaagattcaaagataaactatcaggtactactagttgatcaatattcattgcagtttgccaaattcgattattagtttgttcaataactggaaaattactaccattataggctggaattaagtccaagagttctaggtctaaataattactaattgctaaaaagcctaagccaattcctaaaataggtaatttcccgtaaaacttatcaaatactggttttaaaaatggtgcaacttcttctactccacttggtccattagaaataacaattgcatcagctcgaagattaataatgtcgtaaattgatgcattgtatggtaaaaccacgctattaatttcccgtaaagaaagggatcgcagtagtgaatgctttaaaccaagatcaattacagccacagttttgccaatatttggggcagcataaggatgcgttgtagatatttgtgccgttttattttttggtaaaactagggccttgatttgatcgaaagcatgtgcatcatctgtatccataatagacgctttaataactcgcttattcttcaatttttgaactagagcgcgggtatcaacaccgtagattgctggaattcttttctcttttagaaaatcatttaaatcttgaaaagttggattagcagaaatatgaaaagcaatatcgttagcaattattccacgtacactcggatcaattgattcatagtcgattgcattaataccacttccaccaatcattggagtagtaaaagccaaaatcttaccaaagttggcagggtcggaaattgcttcctgatatccaaaattgcttgtttgaataccgagctcccctgtagcagtaatgggagcaccaaaaccgtgtcccgaaaatgcagttccgtcttcaagaattaaatatcttttcataatctattgcttcatttcttgtcgtaaattctttaattgtttttcaaaaattgttggcaatggtgcagaaaattccaaccattcattcgtagaaggttgataaaatcccaaagtcttggcatgcaaaaattgtccatgacctgacaaggttttctttgggccatataagggatcgccagctaatggatgaccgatgtacttcatatgcactctaatttgatgcgttctacccgtttccagtacacatttgactaaactataatttttaaattgctctagtactgtaaagtgtgtaactgcagctttcccctttggattaaccgccatttgctttcgattatttggatttctaccaatcggagcattgattacgccattttttacttcaaagttgccatgaacaattgccaaatattctcttttatttatcttttctgctaattgcttttctaagctttcacgtgctttatcatttttagctatcattaataaaccagaggtatctttatcaattcgatgcacaatccctggacgaaacccttcaggactatcagctaaatcacgtgtatgataaagtaatccgttgactaaagtatgatctggatgaccggctgagggatgaacaaccatcccttgaggcttattaaccacaatcacatccgagtcttcataaacaatatcaagatgtaagttttcagcttctaatgataatggtttaacaggcggaatagtaacatcaattacatccccagactgtactttataagatactttttcagctttattattaactaaaatatttttatcattaactaattccttaatcttagttcgacttaaatctgtaattttctcagcgattaccttatctaaacgtcctttttcgtcatcaattactaatttataatttttagtcatttactcttcgtcctttagtctttttcgcttataaatattagatagataaaaactaagataattccaactgtaattgcgctgtccgcaatattaaagatattaaattgaataaaatctagttgcaacatatcaattacatattttagatgcaaacgatcaataaagttaccaatgattccacctaaaactaaggctaatcctgtatcaaaaaggccatttttatatttgggattaaaaagatagtaaattacaactgcaatagcggcaatactgattaaataaaataaaatcatttgtccactgaagatattccaagctgctccatcgttttgtaaatatgtaaatgaaaggacaccaggaataatggtcttttcatcaccaattttaaaattagtaactatataattctttaataattgatctgcaatgattactaataaagaaactattagatataaggcttgtttagctttactcattagaataatcctgaaatctttccgttattatctacatcaatatctaaggcagctggatattttggcaatcctggcatatctaaaatagatcccgtagctaccacaataaaacctgctccatttttaagagctaaattcttaacatggagtgtaaaatcttttggagctcctaagatactctttttatcagtaaagctatactgtgttttagccataattactggtaagttgtctttacccattttcttaatttctgctaattggtccttagctttatcagaatattcaatatccttggcatgataaatattatgagcgattttactaattttttcttctacagagtcagtaggttcatatactgaggtaaagtcactagctttattagttaactcaaccactttttctgccgccttaattccgccctttgatccttcatcatggtaagagaccacttcacattcaaaaccatcagctttaacaagttctttcaattttgatagttcttgttcagtatcactagcaaatttatttattagtacaattacaggtacaccataatgagccatgttttccatatggcgctttaagttctcaaaacctttttctaaagctggaatattttcttcatctaagtgatcagttgtctcttctgcttgatacttcaacgctcttacggttgcaacaactaccacagcatcaggacgtttgtccaaatggttagaaacaaagtccataaacttttggccacccagatctgccccaaaaccagcttcagtcaaaacatagtcgcttaagtgtaaagcagtattagtagcaattactgaattagcaccatgagcaatgttagcaaatggaccgccgtgaacaattgctggggtatgttcaagtgtttgaactaagttaggctttaatgcggttgataaaagcgcagcaattgccccctcaaaccctaagtctttaacataaacaggttcatctttcacagaaaagccaactagcatatttccaatgcgctttttcaagtcatcaatatcagttgctaaacataaaatagccattaattcattagctacagtaattgcaaagctagcttcatgttctattccattaaaacgtgaaccttgtccgatagtgatttttcttaaagtacgatcattaacgtcaattccacgttttaataagatacgattaggatctagctctagactattatcttgataaatatagttatcaactaaagcagccaaagtatcaattgcactagttaatgcgtgcatatcaccagtaaagtgtaaattaatatcttccattgtgatgatctgtgcatatccaccaccagttgcaccaccttttaatccaaaaacaggacccattgagggttctcttaatgcaattaaagtatttttgtgaagttggttgctgattgcatcccctaaaccaatggtaatagtagattttccttcaccagctggcgtaggactaattgaagtaacaagaattagcttaccaagctttttaccttgtttaattctgttaattcccttccagctaatcttagccttatcattaccataaagttcaatttcatctggttgaagatcaactttttttgcaatttctgtaataggtaattctttagtgtcttgtgcgatttcaatatctgacttcaaattcattccttctttcttttaagtgctaaaagcaagtaagtattaatcttactctttgcttcatatacaacaaatgccttccattgccacttaatctttaaattttgaagctgaagtttctgacgatatggtagttttagccagtaaacacttgcttctttctgaaaataagaattaaaccaggtataaataactataaccacaaaaatagctcctaagctaagtgcaggatagctaattgctttattgctttcatacccgacaataaaggctacaaaaattagtgctaggagccaggagtaataaattacaccagcagcgcctaaaaaaataaaatgttttttcataatttagaatttaggtcacaccctatttgttaattacctctattgtaacaaaaatcaagtagatttacgtttttgtttaaaatagcgttctagactataatattagacaagaatatggaggaaaataacaacatgaaaatcggcgttttaactgacagttcatcttatttaactaaagaacaatgcgagaaatatggaattgatgtcttaccaattccaatcatctgggataataaagaatatctggatttaattgatattggtttccatgaattctatgaaaagctaagcacttcttctactcttcccactacctctcaaccctcaactggaaccgtaaaaaaatatgttgataaatatattgatgaaggttataccgatctaattatcattactctttcaagcggtatttctagcttttacaataatgttttaagtgtggctgatgaagaaagcagaattaatattcatccctttgattgtaaaataacctgtgcaggagaagctaatgctgcaatattagctggtcgactagtcaaggctggggctgacattgatttaatcatgcatgacttaaaggatttaagaaacactaccgatgttagatttatggtagacaatcttaatcatttaaaaagaacaggccgcttatcaaatgccgctagtttcgtaggttctattttaaagatcaagccaatcttatctatggacgttcaaaatgagggtaaaatttcagcaattgccaaagagagacattataaacgtgcctataatcatattaaaaaagactttgatagtttaacttctgatatgccttatccaattcagttaacaatttttcatgctgatgatgaagaaagagaagctgaatgggttagtgattatgaaagtagttttcctaaggtcaaaatttatcaaagtattatcggaccagtagttggtgttcatgtaggacaacatactatggctatgatttggggcagagatttagattcttatttcgatgaaaatggcaagccgattaaggatattaagtcaaaagttgttgaagattgatactatttaactaatataattaagagaagcaagaattttattaaatttgcttctctttttaatttataactttaagagtgctaattatgaaaaaatataaatattctagttacgatattgcagatattggtgactatttaaaagtttttgcttgtacggcggtcatgtcgcagccaattatgagccttattattaatctgccccagtctcagcaaacgcaagttggttttggtattctttataatctagttaaatatactgctccagcctttatttttggtattttatacacgactattaggactagtgacttaaacggtcatttctcttacttcaagcatctgcaaaagaattggtccaatctctttgtaccaacgatttggtggactttaatttatttattagggatgccatggcttcagcaaggtaataagtttaatagctttggtactttttgctggcaatttattaatggtaatgcagcacctcacttatggtataacacgatgatgctacagtttattatcctaatgccgtttttctggttaattagtcgctatgtaagaaataatattaaacgtggttttgcagtggcaattgttactttaattctttacttatcctggttagcattttacgactattatgtttttcatggtgttcaccaaaatgactggtatttattagatcgagtatttatctctttttttatttatgctgtttttggtggtttagcatggcaatttagatcgtactttaatgaatttataactaagttttggtggttaattgtagtaatctttattctttgcttcatctggactaattatgaattaagtcaattcggttatcctcttaatttctataatgcgccttactataaaccatcaatgacattttactgtttggcagtaatttgcttaattgctgctttctgtttatatcaagttcgtaaaagacaaataaatagcttgaaaatattccattttttagctatttatgcttatagagcctatcttgctaatgtcttttggaatcagttaatctggcacggattaactatgcaatatcatgcaaaattccatccatttttaaccttatttggttgctggttattaacctggatcttatcattttcatctgcgtatcttttacatatgtggtggacaaaagtaaagaaaatgatagctagaaatacccacctatatatctaaaaaactctgaaaattgccactaggagcagttgtcagagttttttatctttagtatttaatttttacatgcaagttatcatgatttgacatatcgtataacgtttgtaaatacaattcataatgtgggttgtccgcaattaaacgttgataaattggtgactttttaagtttttgcaattcttcactttcaatatgattttttccagtaaaaaagtgataattcatttcgccgaaaagacgccccatttttctgacagtatctaaatcatcatgattttgataaagatttttctgcattaattctgccgaaatagttcctagttgaatattttctaaataatcatgaaagtgagttaaagtccagttttgtttttctttgtcagttaaatagtccttcatcttaaaatgatgacaagtataactaacttctttcggcgaaactttaactaccccatagccttgatcattggagcaaaaactagcagttacaacttcggtagctgggcaaggatcttgcggcaacataatattctgagcatgaatatgaccagagaaaactaatttcacattatattgagctaataacttacgcagttcacgataatcatcaacaacatatcctttgtttacagctggattatgagcatagaggttatgatgcatacaaaaaatcacttgaagattattctcactagcatattgaagttgcgccttaatccagcgtcgttgctctcttcctaaaaagccagctgtcgcaggtgcagtagtagcttcttctttaccatagtcattagaatcagctaaaatcaacaaataatcaggattaagctgaacactataagctaaagattcatcatcaacactaactgcatttttataggatgttttaaaaatattacgccacattctaggactaatttgaccagcgtagtattgtttctttccgcggaattctctggcccagccatcataaatatcatggttcccaggaagaactaaaagctgtgtttcttctaaaggtttaaaaatctcagcgaatttttctgctgacactctctcgccattaaaagttacatcccccgtaacaatgattgcggccggtttctttttttgcgccattcttacaaatgcgcttaaagcagtttcttgatagtatagatctttaccctgactagttttttgcatttgtgaaaaagcctgtccatgatcatgtaagctatctgcaattaaatgagtatcactaataacccaaaaactagtcttcttatcttgcgttaacataattgttatctcttattagcccaatattgataatagtcggtccgtaaattaccattatagaattttctcttcttagtggcctttgcaccaaagtatttttcaaattgaggatcagatgtaaggtagtactgactaaaagaagtaagaggacgcaatgtctgtcccatttcttcatagatcttttcagctgcttctcgatccttaagccgtttaccataaggaggatttgcaacaataactccattttctaagtcagttgaaaagtcttttacagcgacttgcttaaattttatatcttgtaatacgcccgcattatgcgcgttcactttagcaatttctaaaattgattgatcaatatcgctagctaagattggagcatgttcctttttttcttgtgctttagcttcttctactaattcgggatgcaatttcttatcaaaccaatcaaaattatcaaatgcaaatattctccaaataccaggagctacattttttgccttaagagccgcttcgattgcaattgttccggaaccagtcataggctcaataaagggatgagaaccatcaaaaggagttagttcaatcaaacctgctgcaaaattttcttttaaaggagctccaccatgctcgacacgatagccacgtttaaataaactttgaccagtagtatctaagcttaaacgtgcagtgtctttgtagagatggatgtctagcggatactcggccccgctttctggtaaaaatccacgtcttcgatattgatcggtcaacttatctacaatagccttttttacaattgattgaacatcaggttcagaatgtaacttactacggacgcttcttccctttacaggaaattgagcatctaccggtaataattctgcccaatcatagctataaacttcatcatataattggtcaaaactggtggccttaaattcttttagtaagatctttacgcggtcagcacttctcagccatagattagttcttacaatatctttttgggttcctttaaaaaatacacggccattttcagttgttgtttcataacctaaattgtttaattcttttgcaactacactttcaaatccagcgcccattgttgcatataatgtatattctttcattttatattttctctatctatataaatttttctataaaaaaaggctgagccaaagctcaaccctaacctacaaatctctataagccacgttctgttccaataggatttggttaattcctattttcagcgaccatctatcttcattaaaaatgacctcgtctttagttcatttacttagacgaaagcgcccctaccaaatttgggttgcccgcttgcagggtttacctcgttccaccagcaaagtttccttcactgcttcgtcactgtggcacttttcaggatagtcacacatgtcaaaaatgatttagtgctttttccgccgtaacttgtaaaaacaagttccccagcttattgggctgagtacaaaaactacaagcatctcagcttgtgcgtgcgtggactttcctcagctagcataagctaaccgcgatcgctcgaaatttgcaataattattataccatagttttaattagcttggtaagttctatcttgttgattcattctttgttcaaggttgtaaactttacgctctaaagtagaaatacgttgaatcatagcaacattagtagttaattccggtgcttctttgtcttcattagtattatttacagcagctttttgtactttctgaggagtataagttttaacatcatcttcaatttcctcattcttaaaatctaacttaggtgcagtacttttagctgtttgctgtttttgttgagcttttaaatcactgatttgtgtttgcaaatcttcaataatagtcgcaaaagtactgtagtctgaaataattgtatcaagatatgaatctacttcatcagaatcatatcccttcatttttgttctaaattgcttttttaaaatactttgtggatttaattgaatatcatttaaacttgccattggtttcgtcaaactccttagttacagactaacgtctgttttaatttaggcgataaaatgttagctagttgatagcttaatggcactcattctatcgtatacaactagtataagttataagtatccttcaagcaataatagtaataccatctaaaaaaaatcttattttcttaggtatataaaaaattaaagagtatatttattttcaataaaaattctttcgatgattttcttcatattcttctgcagcttcttgtaagtcataaaaatcaattatatccagtggatagtcacttttttcttgatactttttaatggcttcatagtcatattttgttttaccgggatgctcaggatcataaagtaaaagagctcgatctgtgtgttctaacataaaattttgatagtttttaagctgcactggcctcatgtaaggatagtcagaagtagaagctgtaaaatcaacctgctcagtaaggttttgatatttcatttgattactatcattccattcttttgagaattctaaataaggtgtcatcaaagccgtatgaacactatagtcattctgcaaactaattgctgtttctaggccccattgttcggttccaaggtttgccccactaattacccagtcaatctttccttcttcaagtaaactctttagataattgcttagagcatacttaattacggtcaacttcggatctttatcgctaaaaactcccaattcataagaacgatatccggtaacccatagtcgcttcattctgatccttcctttctctaaaaatgatttaaaatctttgctataatgctaaacaggagtgatgttgatggtaaaatatccaacaggcagtttaacacattatactaaagatcaaactgaccttttacatccaagaaagcaaaaacatcgtaaagatgttgtattttctgatcgtggaatgagcctagaacaacaaatcaatgagtctaataagtattatcttcttgaagatattgccgttgttcataaaaagccaaccccagtccagattgttaaagtagactatcctaaacgatctcgtgcagttataaaagaagcttacttcaggcaagcttctacaactgactataatggcgtatatcaaggacgctatttggactttgaagctaaggaaacgagaaataagagcttgtttcctttaaagaacttccatgaacaccaaattattcatcttgaaagatgtttaaagcaaaaaggaatttgctttacgattattcgcttcgtaactcttaatcgatattttgtaactcctgctagttttgtgattgaagcttggaagacaccacataagagttcaatgaccttgcaagagttaattgataattcaattgagattaaaagtggatttcgcccaactctcccatacttggatgcaatcgataattttatagatagataggaacaaaagaatggcagataataatcaaaggccaagtaattctagaatggctaagcttcacccaaaaggtaagcctcgtaaacgaatttggctacaaataatcaagtggttctttatcgtagcaatgttagtagttgtttctggagtaggtttatttgcatactatgctaaagacgctccaagcatctcacaggctcaacttcaaagtggtgggacaagtagtctgtatactcgtgatggaaaatttcttctttctctagggtcagaaaaaagaacctatgttgataataatgaaatccctaaagaacttaaaaatgccattgtctctgttgaagataggcgtttttataaagaaggcattggactcgatccaattagaattattgggtctgtcttagttaatgctaaaagtaaaggcgtagctgcaggtggatcaactattactcagcaattagttaagttatcggtcttctccactgctgcttctcaaagaacccttcgtagaaaagctcaagaagcatggctttcaatgaaggtagaacgagaatttagcaaagaacaaatcttggaattttatattaataaagtttatatgaactatggtaattacgggatgggtacagcagccgactattactatgggaaagatctaaaagatcttgatttagctcagactgctctacttgctgggatgcctaatgccccggttacatatgatccatatgtttatccagaaaaagcaaaatatagacgtgacattgtattaaaagcaatgctcagaaatgataaaatttcaagagctcaatataaacaagcagttaatgagcccattactcaaggcttgcagcctaagaagaataattctacttctgaattacgaaaagtagatgatccatacatcaaagaagtaattaatgaagttaagagtaaaggctttaatccatacaacgataacttaaagattacagttaatattgatcaagatgctcaacaaaagctttatgacttagtaaatgatggttcggttccatttactaatgataagatgcaagttggagctacaattattgatcctcgaactggccatgttattgccattattggtggacgtaaacttcctgcagttcaattaggtttaaatcgtgctgttcaaactggtcgttcaactggttctactgttaagcctgtattagattatggtcctgcaattgagtatcttaactggccaacttctcatatgttagatgactctaaatatgtttaccctggtactaacattcaactttatgactgggacaataaatatgagggtaaaatgactatgcgtcacgctcttgaacaatctagaaatgttccagctgttaaaactttaagcaaggttggagtggcaagagcttctctttttgcaagaaaactcggagttaatgttccttctgattctggtctatcagttgcaattggtgctaatgcatcctctcttcaaatggcaggcgcatttggtgcatttgctaatgacggtatttaccacaaaccacaatttgtttcaaaaattgaaactccagacggcttgactagaaattatgatagtagtggtacaagagtaatgaaggaatcaaccgcctatattatgaccgacatgcttaaaggggttatgactaaaggttcgggtacacaggcacgtattaaaaacttatacgaagctggtaaaacaggaacggttaaatattctgatgaagagttagtaagatatcctcaatacaaaaattcaccaaaagattcttggtttgttggttataccaaactctattcaatgggaatttggacaggatatgataatctgaaagatggtactccttcaggtgttggctcatcgtctgctcaacttctatataagcaaatgatgtcatatttaatgagtgataaagctaataaagactggtcaaaaccaagcacagttgttagacgcagaattgctaatggtacccaagataaagtcgtttctccgaatgcaagtaattctagctggcaattatttgttaaaggtcatgcaccaagtaatccgtatagtgatgtgactgttgatagacgaaaagaggaagacgacgatattgatacacgagttgatacagaagatgatacttcttctaagggccaatctcgttcccaaagcagtagttcttcatcatcgagtcgtgctgaacaatcttcaagtcaaagacaatcttcttctacttctaacaacaactccaatactcaaacgcaaaataataatcgccagactgaaaaacaaccagaaaataataacaataattcacaacagaatcagaatacaaataatcagggtaacaatcaaaatcaacaacaaaatcagggaaataactccaataataatcaataattgaaattaaactaaaattaaaagatcccaaagtcgttaaaacgactttgggatcttttttacattatttattagtttaatggtggtaagaaagaatacggatcttgatttttagtccgagcgggcattgtatatctgccgaataaaatcatagcatgatgagtatgaatccattcttcttttggaagcaattcttcaagccgctgctcaacttcatgaggagtcgcttttgcactaacgatattaaatcttttagaaatacgagatacatgtgtatctactgcaattgctggtactttgaagccttctgctaaaacaacattagccgttttttctcccacgccaggtaaggtcatcaaaatctttttatctttcggaatctgaccgtcaaatttttcagtaataatttgtgctgtctcttttaaatgtttagcttttgtacgatataaaccaattgtacgaatgtgattttcaatatctttgatatctgcttgggctaaagtggcactatctggatagtccttaaagaatttaggtgtagttctattaaccattttatcagtggtctgggcactcattaaaacagcacataataggtgaaactttgtgtcccaattcaattctcctttagcatctggatataaagaaagaatcctttttaaaaccaatcgtgcttcatcgtctgataataattcttccatcttaattacctagtttctttgaagaaaatttttaatttgatctagcgtagtaaggccatggcgctgccaatttaggaggattctgtcaacatatttaaaattatatacctgcgctaaaatggcttctctaagagctagcttgactatttctggatcatagtgatcaatattaatccaagcagcaatctcttgtttttcaattgggctcaatagacgaccaaattctatctcaaattgtcttaccaactcttgaattggatttgcggattgttgagtagatgtagaggatttaaaagtagcttgatcttgataagattcttccctctcatcaataagcgtatctaatttctgatataaatgatttaaatcatagaaattagttatgcgaccttccccatcccttttttgccccaattcaattaaatctttatcaattaagttttgaattagctgggaaatctcaatcggagataaattcattctctctgataaattgttatcgctagggaaaaactttttctcctgtttgaaagattctagctgcaataacaacattgcttcagtttcagatatttttaaagagggatagtaacgtaaaagactattagaaataaccgtaaaaccttcattttgaatagccgaaaaagacgccatataattttcctttcaaaaaaagctgaactaaaatagttcaactttttatatttatgatattagattatcaattatggttgcattctgttgatcaatcttgggaatggaatagcttcacgaatgtgatctaacttacaaatccaagcgattgtacgttcaaatcccataccaaatccagagtgaggaacaccaccgaatttacgcaagtcaaggtaccattggtaatcttctaagttaagacctgcttcttcaatttgttgtttcaaaatttcgtagttaccttcacgttcagaaccaccgaaaatttcaccgtatccttctggtgcaattacatcagcacataaatattctttaggattatcaggatttttcttcatgtagaaaggcttaattgtggttgggtagttaacgatgaagactggacgatcaaattgttctgaaatgtatccttcgtcaggtgcaccaaagtcgtcaccccatttaatatcacgaccagcttcttgaagcattttaatagcatcatcgtatgaaagacgagtaaagttaccttcagtagtcggacgtaatttttcaggatctctacccaagatctttaattcatattcattattttcaagaacttgtttaaccatgtaagccaagtatctttcttggatatctaaagactcatcttggtgcatccatgccatttctggttccatcatccagaattctgtcatatgacgacggcccttggattcttctgctctaaatgttggtccaaaagtaaagatttttccgtaagccatagcaccagcttcaccatacaattgaccagattgtgacaagtaagcatcattattgaagtattctacatggaataattgtgtagtaccttctggagcagaatgcatgaagataggagcatcaaacttaatgaatccttctttttcaaagaaatcaacagttgctttaaacatagtatttctaatttgcataatagcaaacggacgcttagatcttaaccataaatgacgattatcgagtaagaagtcaacaccatgttccttattaccaattgggtaaccttcgttgttagaaacaatttctaaatctgaaatttgaatttcatagccaaagtgtgagcgcttatcttcgtgaacagtaccagtgatgtaaaaactagcttcttgacgcaaagatttagctgcttcaaaaacttcttcagaaacatcattcttacgaataacaccttggaaaaatgctgttccatcacgtaattgtaagaaaataatcttaccacttgatcgtttatcagttaaccaaacatgcattttaacttcttggtctacatgtttagaagaatctttaattgagattaattctgtcattacttaccaacctttttaattaaatttaattttattatactaaaaaatcactctttagtttaacaaatttataaattatccgcatagactacttcttttccatttctaaaatcataaagaacatagccataattaccatttttctttttatatgttacttcccaaactggcatccccttataccaacctagctggcatttagggttattgtgtccaggatgctcatcattaaaagtatttaaaatctgttcttcacttttacctttatttgcttgataaaggtaagcttttttgctttttggaagataaatgaagtaatactttttccccttcttactcattccttctaaactattgctctcaacgctacgacttaaatggtagttcttggtaactgtagtaattggggtcttttcaagggcaatcttattagtttctttaactgtgtcacttgctggcttagttgcaatataaaacacaatacaaagacataaataaattgctgccaaaactccaaccacaattccagtgattttaagtcctttttttacatatctattcattctgtttactattccttaaaacatttagtagttgttgcttgctaacctttttagcactcacaggtagtcctgataaaaactgttcgccataagatttattccaaactcgttgatctaaaactacaaagactccatgatcacgctcatttctgatcaaacgaccgcatccctgcctaaatcttaaaattgctcgtggaagtgtatccacttcaaaaattttatcagctccaacttgcttttttaaacattctgttcgtaattttacctcgggttgatcgggtgactcaaaaggtaaacgcgtaacaattgcaagatctaccccattatgtttaaaatcaattccttcccagaaactatttgctccaagtaaaatggctttttcagcaattccgaaacgtttagcaattttttcattagaaccagttaagccttgagccaaaatttcatagtcctttaaagcattactgttttcacttaatctgctaaaaacatcccggataacatctaaattagtaaataaaactaacacatgcttatagtctttaatttgagtaagtaaattactaataaatgtttcatattcaggactgtttggatcctccggagcattattatcggaaagtgcatatacttttaaatgcttttcaactttgaaagaaggctttgctcgataagtaagtgtttttttaggatctaaatataggtttttgatagtgtatgagaagtcgtcttgttctgctaaagtagcagaaataaataattttttatcaaagtaatgatataactgtttaacttcttcttcaggatcaagtgttaaccaagttaaattagtagatagtgggtcatcttcattacttatttctaaaacaaatccttcatggtctaactttttagggtcacttaattgatcaagtaaaagatagttttgctctgagtaataatctaactgatctatttcttcctgaagatctcttattaaaacatcatcgctcgttaaaagattcttttgttgatgatatagcaaaaataggagttgattagtctcttggcgcacaatttcaatattatcttgcataagatttaacaaatgcttgaagtgcccaatattgttgaacaaatcctgtccctgaaatccgagactaatagcattttgtctcttctcttcccaactggtagcaaattttcgattatcataaagggcttgctggatcttgttaatagaatgaattaaatcatttgtatctttttcaagtttatctaagatcaatttgaattctaaattattaccaaaacgtgccttagcactatcttctgcataaaaaagtaagttacgtaagtgactacacatcccccagaagctttcaaattgaagtgaatcatttcttgaacttgctacattttcaacaaaacgatgcgcctcatcaacaactaggaacggattctggccccaaattgagtccatatagtgattagctaaataggcatgattagtaattaaaatatcagcttgttcttgtctactacgtgctaaattccagaaatcatattctgcaaaggctgttccaattctcgcatctccaggatgttcaattgctgcaaagagaggtgcctcatagttagttaactggagttcatctaaatcaccagtttctgtttcagtaagccagatcaaaatccccatttgtaaaattaaagtttgctgaatcggattatcagtctgataaagagaattgtaaaatccatctaaatctaaataatgactgcttgatttaacaatttgggcatctaagtctaaatgagtaacccgtaaaagttgcggaatttcctgctttagaatttgttcctgtaaaaccttagtgggcgttgctacgactaattttctcccagaatatagctcatacgcataagccattaagtaactaaacgtttttccgctaccatttggtgcttcaacaactagtgagttatctgagtcactgtaaacaaagtcgtggagtctattaattagactaacttgtccccgtctaaagcggagattctttttaaataattctttcttttcatcatcgctttgaggaaatgatccaggacttgctacatcattacgacgtggagctatattttgctttttcaatattaaatgttttacctgaaccaaatctttaggcaacggtctcttagtctgccgagcaacttgaccaatttcataaaaaatataatcagtatctcgtagcagtccttttgataaggaagtcaaagtattgagagttgcctgaggaagattttccagtttcttaattgcttttagtagtaactttgccgttactagtgcatctgaatcagctcggtgcgggtttaagtgtttaattctcaagcgagctgttaaatctcgtaatttataagatggaaaagttggaaaagcaatttgtgctaactccaccgtatcaactgcttttccagttagtggctctaagcccgcatttacaagctcatagtttaaaaacggaagatcaaagtttacattatgtgcaacaaaaatcgtattttctaagatttttcgtatctttggtgcatagtagctaaaatcatgagcctgcgccacgtcttcattactaatatgagttaagttttcaacagcttgagggatttcacgatgaggattgattaagaatgaatatgtttttactaccttacgctttttgatgattgcacaaccaaattgaataatatgatcgccttgattgcgctgggtgcccgtagtttcaagatcgacgacggcaaaaacatcatctgtaaaggcttttttcataataatctcccttctattctgtttctagtctactgggaccactttccttgcgtcaagcaaaattaaatattttccaattacctttttattttccgatatttcatttaatgcttgttcatataaacgtagttgcccagtatattttttcttaattttgtctatagcttgttcttcatgagttttatcaacaaaatcagttttatagtcaaataaaattaaaccttcgtctgtttcaaaatatccatcaattgttccgtgaactagaattttagctgctgagtcagaaaaatcattaaacagttcactagcattcactaagcttgagaattggctttctctatgtaatttttctggtttttgccaaaattctgccgcaaattcactcattacaaaccaatttaaagcttcttttgataaatgtggcaccatcaatgggtttaatttacctaattctacaagctcttcaatttcttgttctaaatttatctcagttttatcaccctgataatcataatactgtaaaactaggtgcatcgctgttccgatctctgctccagtaaatttttgtttttctaaaaatacgggagtctcatcaattggttgtaaatatcgattacttgaagaaataagacgtgaattctcaagttcagtatccataggatcattaaatactttttttatctcagaaacagactgataggctgtagtcttagtggcatccgcaaatggatattcaaaattataaagggttttgactacatcattcattttagaacttaatttttgagtatcgtctttttgctcatccttttcttctatatctgactgcacagcaaactttaagtaatatatcttatcttgctcttctaaagctaaggtcatgtcttcaatcgtttgatcaaattcatgcttttgttctagcttaggtcctagaaaatctagtggagactgggcattgatttttcttattaatggaaggatgttcgttttttgatcaatttcactttcccactttttctgcttagcttccatctcacttacactagcaactaagatgagcttttgttgagcacgtgttaaaccaacgtataagattctagcttcttcttcaagcatttgttgtcttttttcgacatcggctaaagatttaactagggaatcaattcgataatctttttctttaattgttaaccctagtccatctttactaatcgtaaaattgccacttaagtcacgtgtctgatacttgtgacctagtcccatgacaaacactaccggaaattcgagacctttagaagcatggatagtcattagttttacagccttatcagccttatcacttaaaagtggttgtgctaaatccttttgatttttccgcatgcgctcgataaaactaatgaattgatataatcctttaaaaccggcactttcgtaagaagtggctctctcatatagagattctaggtttactctacgctgttgtccattaggcaagccagttacaatttctaacagatgggttctttcgtaaatactccaaatcaattcagaaattcgatgggttgccgcaaatgaacgcagagattctaattgctgaaggaagtttttacatttttgaccaagatccgaattgactgatgcaaagctggttaaagcattataaaaatttccggatctagttttgaccctgatttgcgctaattcaggctctttaaagttaaaaagcggtgaacgtaagactgccactagagggatgtcctgttgtggattatcaatcaatctcaagtaattcatgatcatcactaattcaaatgtttgaaaatagttctgagcatcagttacaaataaaggtagatctgcctttgcaaattcttgcattacctgtaaattgtcacttctagtacgcgtaataatggcaatatcagaatattccagcgggcgtttaagctgtgtttttcgatcccagacttggaaattctcttccttaagttgcttaattctggcaataaccatttgaatttcactgaagtccatttcgtctccgaaattttcttcaaatgaagcttgcgtttgttttttatccgtgaaaatatattcacttgcagtaggcaagtcagtaggataataagtcgcgccaaattgtaattgtccttcttttttgtaatcaattccgccaaaatttgcagttagaattggattgaacaaagagttaactgtcttagtaactctttgtgttgacctaaaattatctgataagacaattttttcactatcatcattctgtccataagcatgatatttgcttaaaaacaagtcaggacgtgcttgtctaaaaccgtaaatagattgttttatatctccaaccataaataggttgttttgtcccttctttttgatagctgcaatgatattttcctgcaaagcgttaacatcttgatactcatcaattaatatttcattgaatttttcttggtaatactcttgggcaatatgagcatttgaagtatcggtagtaagaatgctgaaagcaaattgctccatgtcactatagtcaattaaattctgttctcgttttaattgaccaaatctcttaattaattttttttcagcatcaacaatggttttaactaatttttctgattttttgagaatatttacctgttctttttcttctactacaaaaaagttagcaaagatcttcttaagttgatcatttaaatcagattttagcttttgactttcttggtaagtttcaagactttcctctgaccactttttagacttgcgaatattcttttcaaacttacaattcattagactagctcgaatttcattataagaatgatcatcttccaaagcatttaagaattgctctaaacgactggtaaagatatcgtagttttccttaaccttcactaaatctggattttccatttgaggattttcaaagaactgtcttatttcagtttgtagatcctttatctcttttattaaaagcggtttaatttgagtctgccacaggtcagattcaattaaatcatcttgaacttgataaaaattaggtaaattattgagaaatttttcataattaggctcagtaactacagtattgtacaactgcaataaaagatttcgagctccttctgcatccctatcaccagaaaaattatcatagaaatcctgaaaatcttgatcatttttttcaaggtactcaatttctatttcatggagggcacgctcttttaaaagctcagcttgggtttcatcagttaaaacactaaattgtgggtcaagatcaattacataataaaaacgtctaattacatctaaacaaaaagaatcaattgtagatatattagcagtatccacatcaagtaattggctacgaagaaattgattattaggctctttttcaatttgatcacttattttttgcttgattcgttccttcatttcacgagcagcagctttagtaaaagtgatgatcaaaagcgacgaaactggtgtaccagataaaatgcgtttcaaaacacgttcaactaatactgtggtctttcctgaaccagcggatgctgaaactaggatatctttcccataatcgttaattgcttgattttgttccttagtaaatttcgtcaactattcttcaccatccaagtctaatttttctcttattagggtcaaaagtgtctttttatcaatagatttaatcttatgatagttattttctttaagcattgcatcaaagaagaatatgtctttaaagtcagaataagtaagggatgtttgttgcccataagaataaggatctagctcaatctttcctgacaaaatctcattaccagcattttttattaagtaggagttataagctaatagcaaatctagttgatccggagtaaaactctggttttgtggccagctaatatagccgtttacttttcgtttaacactggtatatagatcagagacagcacgatctttttccattccaggttctattagatcaagcatttcttcatctgcaattaagattccgttatacattaacttcttagtactttctttagccaaatctttaatttgataattgcttaagatcattttttcactgctcaaacgttcaagactactagtaatattttggtaaaatgcgcctaaaacatctaaatccttaccttgagcaaaaaacttattattattttttaaaacttctaagtaggaaatcatctgcattgaaattccgtttgcaaataaacctaggtcaaatttttttgcggatgacttataatcgatcacctcacctaaaactcgatcatttacttgagccaaatcaactcggtccatctttccgcgaagatctacaatcttctttttattattatcatctttccagctatatgaaagaccacttaccttttgatttttaccaaaacttaattcggaatattgtggtctaaaagtcgtcttatttacattgctatgccagtaatgagctacattagctgtagtttggtctaacttatgaaatagatacttattaaatggatcatttaaaagctgacgatatctgcccttttcttttagttcttctcttacttcaattaaaagctcgcctaacttctcctccgttagatcagcaaagtttaacttcttttctttaattcttttaacaagataatcaaaagtttcatggtagtagtttcccgcttgaattacatcgagttcattttcaaagcgtttcttcaaatgtaagccataatttaggaagtattcaaaagaattttgataatacgtttctagttgtgaaacggaagtttcaatacgatcaccgtatagctgctgtgctagctcaggcgaaagatcttgaggtatattcttaaaactgctcccttcaagcacatttttcgctacttcaccaattttttcttcagtcattttcaataaagagtctacatcagtagctgctttattttttaaataggttaagtaacctaaacttgcttctggattagttataaaagttaaaacctctccattattctgaggtaaatcatgttgagcaaattcatcagcgcgagttaactttaataactgcttataaaaaattgaaggttctaattgttcatttgcagtattaattactggataagaaatataaatcttatcactagccaagctcaaagcatttccaaattggtaattttggtctaagttattgattttttgctgatcttctaagtatccattagcttcatttccttcatttagctgttctaaattttcagagctaaagaaacctggtattttttcaatttgaggcaagttagtactagttgcaccaataatgaaaacctgtttatatccttggccttgaaccatacctaattcagaaatgttaactgcatcaagagtagacggaatttgtgaaaaattagcttcactaaagccgctgattaacagatcaaaaaattgatctacagaaaacttatttgctaccagtaagtagtcctttaataagtcagttaaagttgaccaaacttgctctggttgctgggctaattgtaaatcaccagtatcattagcttctttgcgccaactttctagacgtttcgcaacacgatttttaattagaaaattccagaaaactgttactccagcttggggatcctcttctttatcaagttgctcaaaaaacttagttaaagcatcaataaagtaatctcgtagtcgatcaagatcctctacttctttctcagatttatctaaggcaattacatctgcatctacaaaactctttagtgatttcgtccatagcttcccttttataccgtgggctaagacaaaattttcaagtaggtcaacatcattttgatagcgagcagaatttttgtaccagtcagggatgaataactgcgtcttcattaaagcaattacattatccgtttgaaaaccacgcttaaaaatttgctgtagattttcaacagcaactactaggggatggtatttcatttctctttgcaaatcattaaagaaaggaatttggttttgccttaaaatcggagttaaatatgtttcatattcacttaaattaggtgctaaaactagaaaatcctgatagcgatagttatttaaggctacctgttggtaaattgtccgcgcaacaaaataggcttctgcataccgcgagtctgctttgactggctgcaaaaacttacttaaacgttcatcaaacccactcgtttttgtccaaaccccatttagtaaagagctaggacttgtttgagtaagtggatactcttgagtttgataatctaattgctgattttgccaaaaatgctctaattggccgattgtacgttgcactacgtagtcatagtcacctggttcagcgttattatcaattttgccaatttttgtcttaaaagctaaagttgtattttttgctttttttgaaattaaacgaaccgaggttaactcttgtaaagaaaaatgtgaaaaatcagaaaaataaaattccattgtactcaagttattgctttttgctaagaactgattaagcaataattgcatttcatctttggtagcaaatttttctgataaacgttcaataaactcatcataaataattcttaagtcatgaattttatagctggtctcttcatttaatttcttttcatcaatattgtctagttcaatattaccggctcgtacagataaaatagcctcatacatttgtcttaaggcaccggatgtaacttgagtttgattctgaaatagttttaattcatcttgatgatctttaacaatttgctctagtagcatgacactagcggcatcatctagaatttgtggtagtttaattgcctcatctctcaagaaataccaagctagccgtgaaaaagaaaggatgtgcaatttatttactgcaacttgttttttatttgttaaaacagagagcttgctaagtgcgcgtacttctgtggtaaacttaatatggtttggcacgataataaaaacatcgtgtcttttatcttggtagtatgacttaacagcttgatcaattatttcattttgcaagttgtctacttgtctaccagtaattacattaatcataagtctctagtctccttagcaaatattttagcatatgagacaaggcaattagacttaatgaaatttataatataggaaagataattgtgaataaaaaaatagaagtcaaagcacatggaaaagtgattcttattggtgagcattctgtagtttatggctatgatgccctcgctcttccaatccaggccttaaatatcaccacaactgttgaagaaactgatggtcctacttggatggatacaactcattatcatggtgctttttttgatgcgccggatgaatacgatggtattaaatatattgtgaaaactttacttgaaagagtagaaaacgctcctaatcttaaaattacttatactggtgaaattcctatggaacggggttttggatcaagtgctgttgtagctttaggaactaccaaggctgtttcacaatttttaggattaactctttctgaagctgagatcatggaaatcactaatcatgcagaaatgattaatcatggaaaagcttccggccttgacgctgctaccgtaaattccgattacttagttttcttcaataaacaagacggaccaaaacagctttctcaaaaattaggtgctaccttattaattatggatacgggtgaacttggaaataccaaagtcgcagttcaatcagttaaaaagcaaatggatgaaagtgatcttaaaaagaaacaaattgcacggcttggagaattagctaccgcaacacgacaaaattggtttaaccaaaatgcagaagagatcgggaagatttttaatgaagccgaagacatccttgcctcctttaagctttcaactgaaagaatcgataatatttgtaaaattgccaatgaaaatggcgctttaggagctaaattatctggtggtggcttaggtggcattgtaattgcactatgtcctaatcaagaagttgctaaaaaaattgccgaaaaagctaaagctaattttgataatgactggattgaggaaatttaatgaagaaaactgctcgtgcccacactaatatcgccttaattaaatattggggaaaagctgaccaagctttaaagacaccgttaatgtctagtctttcaatgacattagatgccttttatactgatactacatttgaacatgattcctcattaactgaagatacctttattttaaatgatcaaaaacaatcagtagaagacagcaagcgagtttttaattatattcatttattacaagaaaagtttggcgttaatgaccactttacaattcggtctacaaaccatgttcctacttctgctggccttgcttcctcagcatcagcttttgcggctcttgcaacaagctttgttgcaagctatggattagatctttctaaaaaggagctttcaagacttgcacgccttgggtctgggtcagcgactagatcagtttatggcggctttgttgaatggaaaaaaggatttgatgatgagagctcctatgcagctccaattgatgaaaatcctgatcttgatctttctctactagcaatcgaagttaatacaaagcagaaaaaaatttcttcaacaaaaggaatgcagttagcccaaacctctcctttttatcaaccttggttagctagaaacgaagaagaaattgctgaaattaaacaagctatccaaaataatgactttactagaattggtgaacttagtgaactaagtgccaacgagatgcacgcttgcaatttaactgctaaagaaccctttacttattttgaaccggaaacaattaaaattattaaattagttgaagatttaagaaaaaatggcatcgaatgttactatacaattgatgctggtccaaacgtaaaaattctctgcaccttaagaaatagaaaagatattatttcagctgttcagaaaaccttgactaatgttaaaatagtcgttgcgagtttcggcccaggcgttactctgctttagtaatttgaaaataaaaagattagaggaatattcgttgattacagaacaagcaccaggaaagttgtatattgcgggagagtatgcagttcttgagcaaaactgccctgccattttagttgcagtaaatgaatttgtacgtgtttcaattgcaaagagtacaggtacaagtgggttaattcattctaaacagtattctcaagattcaattcactggatccgtaaaggtaaccaaatggttattgataatcgtgataatccgtttgaatacattttatctgctattaactttacagaacgtttttgtcttgaacaaaaagtttcaatgtctttatatgacctacatgttaattcagatcttgattcagccgacggtaaaaaatacggtcttggctcttcagcggctgtaacagttgctacggtgaaggctattcttaatttctatggattacactgtacaaaagatcttatttttaaactttctgctatttctcactatagcgttcaaggtaatggttctgctggtgatattgcagcaagtgtttacggtggttggcttgcttatcaaacttttgataaagcatggcttaagaaagaattagctactaaatctcttagcgaagttttaaatgaagcttggcctggtcttaagattcaattattaactcctccagaaggactaaacttggtaattggttggagtcaaaagcctgcttcaacttctcaattagttgataaaactaatgcaaagaaaaagtttattaagactcaatatgacacttttttagatgaatcacggaaatgtgttcttgatatgattaagggctttaatgaaaaaaatatttctttaattcaaaaacaaattcgtttaaatcgtcagttattaaaagactttgcttctcttaaccatattgctatcgaaatcccacgtttaactaaattaattaatattgccgaacaatttaatggcgctgctaagacttctggtgcaggaaatggcgattgtggtattgtgattgcagatgaaaaaactgatatcgaagaaatgaaaaataattggcgtaaaaatggaattatgccattgaactttctagttcactcaattgcttagtgggaaaaattatgtcacaaagatctcaaagaaaagaagaacatctagcattagctaagatgttttttaatagtaataaagataatgattttaatcatgttcatttaatccgccctgctcttccagaaagtgcaataagtagagatagtatttcaactgaaatgtttggtcatactatcagtactcccttctttattaatgcaatgactggcggctctgatacttcctataccatcaatcaacgtttagctaaagcggctgccgcagaaaatattccgatggctttaggatccgctagcattcttgaaaaagaaattgatcaaatagagagctttgaagttgcacgtcaagaaaatcctgatggactaatttttgcaaatgttaatccaactactgatccaaaagtagctcaaaagattgttgacgctttagatgcaaatgcattacagattcatcttaatagtgttcaagaagctgtaatgcctgaaggcgatcgagattttcattggatagataatctaaaagaaattagagatacagttgatgtgccaattattattaaagaagttggaatgggaattgatcctgaatctcttcgtacccttttaatcaatgacttttcaattatcgatttaggtggaagtggcggaactaattttgcgcaaattgaaaatgaaagacgaaagactcaaaaattaaactttttagaagatattggtctttctactgttaaaacgctgcttgcagcacgcactatccctgttaataaaactattattgcagctggtggcattacaaatgcactggacatttttaagtctttagttttaggtgcacagtatgttggtattgcaaactatttcttgcagtatgctagccaagattccgagactttgattgctgctattcaaaacttaaaatatgaattgaaacttttaactgctctatttggtttagatcatatttctaaagccgatgaagttagatattatttggatactgatctttacaatttcactcgacaactctataattagtgctatttcgttggatggctgctataagcagccatcctttttgttttatttattttttaaatgttaaagtaacaattttattaatttaaatataaaaagtaaaaaagttcattaaattaaatttggatcaataccaaaagttaatttaatgaacttcgttctactaaataacaaaagctaattaataatgtttttattcttttatcaaatgaatttcccggtcaaataattcatgcatttcttcagtaaaattatgggcaataaatacaattgttgctttactttttaacaatttgtctaaaatatcaatggttgaattttgatcaatcgcacttgtcccttcatcaattaaaataatatcactctcatgaacttgagcccttgctaaaacaattttctgcctctgtcctccagagatgtttagtttatcaagatccaattgtttattaattccctcctcaaatttttgcagatcagcagataaatttacttcttctactgacttttcaaccttattatctagcttgttgttaaacatagtaatgttttctttaattgaagctgggaatataaccggatcttgcggtaagtatccaattgttttcaaatctggattaatttcatttccatccttatcttcaaaaataatcttcccagcactaggtgctaattctcccaatattaatttaaatagagttgatttaccagtaccagaatctcctgttaagagaatcttttcaccctgattaatctgaatatccggataacttagtttttcgccatttggaaaatttagtcttaatgattctgttttaattacagtaggcatatttgttttttgcttatctgaaacttgaactttttccgctgcttcatttacttcttcaattagactctttactcccttcatttctcccctagcctgagagatttcattaattgcttgatttaaataaaatctgaaatttcccactattaatagagtactcatttgtactaagccatttttgactaaaaatccagtcaaaacaaatatgatcaacccaaacaatgcagaagctatcccgttaatcgcattaagtaatttagtataagtagtttgcttaacagttgcgtcttcaagttttttactagcattttgagtgacagaaaatagctttgcaccagctgcaaattgtcttaattgatctaaaccgcgtagccagtcgtttaaagtatctaaatatatttcattgctagtcgaaataagtttattagctttttggagtggtttttcaatcaattttggcaaagctagagaaatggctacaattatacaaattgtaattaagagagcccaacttaacataattaaatatatgataattgcaataagttgaacaactccaaaaattagatttagaagagagccgtagtaattatcattaattaattctaaatcattagttagtctactttgaatttttgaaaccggatgatctctatcatcatggaaataataatctactatcttttctcttacactattatttaaatcttgcgtttgagcaagaagtagatattgggtcaaactaaataatgcataaaacattatacatacagttaaactaatagctgaaattatcaaaaaatttggtaaatttcttgaaagaataatactcgtctctatttgaactaaggccgtcatcgcaattgttaaaagaggagaaagaatagctaaaattgaaaacagaaaaaaacgtgtcctattaattcgaataaaatttcttaaattcattattcctcttcccctttcttagctaactttatttcttgatcaaacttagctcttaactctggtgtaaaattatgggcaatcattaaaattgtctgatcagtttttagcaacgcagtaataatctcttcagtagctttttgatcaattgcactagttacctcatccattaatacaaatggttgatgataaatttcacttctagctaatacgatcttttgtcgttggcctccggatagattatttttctttaaattaacttctgtatcaattccagaaggcaatttatctaaatcattttttagttcgacattattaataatattcattaattgtttttctgttcttttaacaaacatcgttatattatctttaattgaaatcggaaaaactattggatcttgcggtaaataaccaaggttagcattggttattggtcgactttctttatcaaaataagtaatcttaccacatttagtctcaattttccccaacaatgctttaaataaggtggacttccctgttcccgaatctccagttaaaagtactttttcaccaggtttaatagtgaaatttggataagtgagagtctcaccttcatcgtatgtgactttcaaattttcaaccgatacaccataagcagctgtctttacaggctgcttttcttttttacgtaaagttaaaatttcctctcttaatgttttagttgatttaactaaagtaattgaatgggtaatttcccaaactgctgaaaagatagctgatccaaatgcacccgctacagcgaattctccaaaagaaatcacatgatttaagaataaaattcctgcaaaaaatgatattcctatttgtgctaaggcatttccgaaaccattgaataagtaagaagtagtttggtaccgatagtttttcttatttgccttcgtgtaatcgtcacttgccttatgtagctgtcttctcaatctctcatatgcactaaagcgtcttaactcttgcagtccaccaaaccaatgttcaatcgtatttagcaacttttcatttttatcatttacgttcttagttgcctgagctgttttcttttccataattttaggtagaagaaaattaatcgctagtaatatcgcactaactaaaattaagctccagttcatagtaaataacaaaacaactgcgattaaaatttcaagagttccactcaaaattgatacccatggcatagcaaagttggtagttaatagcttaagatttgctgttaattgattttgcattttggaagttttttcatcttctgaagaagcatagtaatgctcaataatttcttctctaatcttatgaacatagtcttgggtttgtcttgtgaaagcaattgttgcaattggtaataaaactgccgtccctatttccatcccagcctgaataaaagtccaaaaaagatatccatttaagttacctttaagaatattgtttaatgaatctttaaaaagatattctcccattgaacccgcaactgcatataaaatatacaaacaaaaaatcagtattgaacggggaacattaattttaaccaactctttaaacgtcattatttgcccctcctatttttatttgttattaattatactaatatttttttaatttacaatcatatttttataagcggacaaatttatgacctaagtggtatattttcggacttaacgagtatgctatacttattttatctatgataaatcgaggtgattactaagtgtttattctaaataacttaggattaagcttaaaactgaattattttctttcagttattaagctatatttaataaatatccccaaatttgatgaaagtttggggtttgttaactaaaatctagctatcttttccctaaactttcatgtactcaataaatttaagtattaaaaaggaacgggaaaatgactaacaaaaataactataacattataaacctcttaatcggccggatcggaacaaatgttgctgactctcttttctatatggcgatattgtggtactttaaaacccattttaattcaccaatgcttctttccgtaatattcatagctgaatctagcattgatatgttttcgtttactttaggacctataattgatcgtatagatatcaaaaaagcattaaaattagtgacaattactcaaacaatgctgagcgtaatcattattccgctatttaataatcaaaaattacactttttaggaattacatttttgatagtagtctatgttttgtcaactatcggctcaacattaatctatcctgctgaagacaagatactgcccaatatagtagaaaagaaagaattacctaaagttaatgggatttttcagatgtcttatcaaactttagacttattcctcaatgctggagcaacaattttaattacctttttatctataaaaaatacaattattatttcagcattagtatttgcatttgcacttttgttctacacgcgtttacactttaaacttccagctgcctcatcacctgaaggtaatactagctatttcaaatatttagtaagtggttggcaagcattacgcactaataaaaatattttaattttaatcttgccttttgctctaactaacttattttatggaatatcatctgttggtttaccttactttgccaccaaatacttaaacaatagtgcacttagctatggaagtttagaacttgcctcttcaattggaggattactaggcagccttatcgtacagcgactttacgtgaaagacagccaactaagactattaattgttacttgcttaatgctatctggattagcaattgttttagaagtaataagtgccccaatttggcctattttaattctaatatttgctctatgtagtactttctggattagcatcatgaacatcaattttaaggttctagttcaagaaagtttttcttctaatttattaggacgaattatcacgattaacagcagcattgttaattgcatgattccgattggatcatttttaggaggatttattgttaaaaactacggtgctcgtgcagccattattcttgaagggctggctcagctagtaacagctgtcttctatctaataatatttttaaaaagaaaaagagcataaatgctctaactaaggagttttctaatgagtaataaaaaagtaaaaattaataatgctgaaataaaaacaagagtagttttctatcgtccaagtcaatgattaattttaatttagaaaagagatttttatggcgaaagatttgattactacagttacaacaaaaaatgatttcaaacaggcatttaacagtgctcatcttaatgcctccgacacagctattgtccatacatcattaagcaagttctactatattcccggtggtcctgaaacggtcatcctggcacttaaggagacaataagtaaaggaaccattatgatgccttcagaagtttcgacaaattgtgatccagcaagttgggagtatcctccagttcgttctgatctaattcaaacaattagagataatatgccaccctatgatccaataacctcagctactgagggactcggaagaacacctgaatgtttcagaactctgcctgatgtagttagaagtaaccatccctatctaccaatcgcaatttggggtaaaaataaaattcaaatagccaaagaacaaccattaaatcttccatacggcattaatagtcctttagattatctctacaaaaataatggtaaaatagtttttctagggacagactatgaaacttgtactgcccttcactatgccgaatcaacaattaatcggccaaccgaaacatggtcagctgctactggtcttgatgatcaaggtaaaactacctggactaaatatcaaaatgttgacctagactcttatgatgattttaatgagctcggattagcttttgagaaacaatatcccgagtgctttaaccaggtgagcttgaacaatagttttatcaaggtaatcgaaatgagacctttaattgactttgctagagactggtttaaaaagaaagataataattgataacaaaaaaagtaggatttaaatcctacttttttctataagtttctttttttacaaaaactctatacgttatacgatcactgtcatcgtagcagctccgataatgatggctaaaccaattaaagtaactaccatttctttcttagtcttcttttcatgcaaaaaccagattcctgttaaagttgctaatactacagatgtctgtgacaaaataaaaccagttgctaaaccattcatatttggttgagccgaaattaaatatgtcaatgcagcaaatgcaaagaaaaatccagagataatttgtttgtaagaaaccccttgagctaaagcgcttctttgacttggttctttaacttttaagtaaactgcataacaaatagcaactaagcacattccaatagcttgtggtaaaaatgctttggatccatcaattttagcagcttgaggggctgcagaatatgcccaatatccaatttcaccaactaataaaatgattacggcttttcttaacttagcactgttttcatcagttttatgttcactccaggttgtcatccaagcacctaaaatgatcagcgctaatgcaagaaaacctactaacttatcactcgtacttggccaatctcctaaagcaaatactccccataaagaagtacctaacaactgaaaggcagttgtaattggcattgcgcgtgatgatccaaccaaagtaaaagaatgaaaagtaagaatctgcgcactagcccagcctattccggagataattgaccagatcaaagcagcaccgctaggcaacgctattccttgaactaagttatagactaaagcaaagataaaagtaccaaatgtagtaccaataatttgatttactggtttaccgccaatttttgaggcaattgtcggaaacaagccccatccaagtaatggccctaaaccaattaataaagctattccattcatacactaaactttccttaaaatataaaagtaattgtagtttacatacgcaattacttttatagctaaatatctactttaaaaaactactccactttccaaaattacattagaatatggagtttcttcaccagttctaataaatgctttagaagactttaaatccttctttagttctgaatgaggaataaattcaatctcaacattcggaactgtcctcttaatagcttctaattgctttggattttcagttttaatttcctctgcaatatacattttttgaacttctaattctttcaagacttcttctagaacatcaataaatgatggcaagcctggacgtacagataaatcaatcttttcagtctcagctggaactggagtaccagcatctccaactcctagccaatccatgtggcccatgtccgcaattactcttgaaatattagaattcattacgccagtttttttcatagttattaatcctcttcttaaaacgtatttactaatattctaatatctctttttaatattaacacttttaaagcagtttatgtaccgaatttattttactcgcttctctcccctacctccttaatcttgtataaaaaccacctaagagttcctaggtggttctatgcttattaaattattctactcgtcaaaaaagatttttgtatttcccatcagattatacattttctggattattgggttctggactcatcacatcgacatctaagtgaatataaatataatcaaaattattttctttaatccattccttagccctttcaaaatttaggacatttcctttttcaatcttatacttaagaatacctttttgtctttctgtaaagaagattactacgcatcattagaaattcactccttttaattgtatgataaagtctatagcaactagagagtcaagaaaagaatatattttcaattggaaaatatctggagttgtctacaaacttttacttgatgacttaatagatattctatagatttattaaaggaactttgaatacaaattttctgctctaaagtagtattttttgaaaggagcgttttcattagtgacaaatattattaacggccgtcaaattgccaaacaacttaatcaagaaaccaaaaccagagttgataaattaaaagaagaagggataattccaggaattgtagttattcttgtaggagatgatccggctagtgtaatttatacacgtaataaacagaaaaatgctgaaaagttaggcatgaaatctatcttgagaaaatttccaaaagatgtcagtcaagctgaagttttacaagcaattcatcactacaatgatgatccaactattcacgcgattttaattcagcttcctttgcctaagcatcttaatcaaactgaactaattgaagcaattgctcctgaaaaagatgtggatggttttaattcaaaaaacgttggaaaactctataacaatgaagaagggcactaccccgtttcttgtacttcccgcggaattatgactttgcttcatacttacttagataaaattgaaggcttaaatgtcacaattgtcggccgcagtatcttagtaagtcgccctcttcaatcgctcctcattaatgaaaatgcgaccgtcactatggtaagtttacacactgataatatcgattattacactaaacatgctgatattttagttgtggctgctggcaaacctaatttgattaagaaagatcaggttaaacctggtgcaaccgtgattgatgtggggattaatcgaatggcaaatcattatttagttggggatgtcgattttgatgatgtcaaagaagttgctaaaaatatcaccccagttcctggtggagtaggtccaatgactatcgcaactttaatgcaacaaacggtcgatttggctgaatggaataaatagaaaaagacgttaaacagtattacattgcttaacgtctttttctcttctattactttctctatctcaattgattcaagctagagccaaagatttgtttaatggtctgtgaatcatggtagtcaaaagattgaccaagatttttactctaccttttcaaaaacttcacataccattggtgcttgaggataaaattctttacccacctcttgatattcccaatcaaaaaaatcatcatgggttcgacgccaatattcataacttcgatcaccctcaccttcatggtaggcgtgttctttagaaattaaatcataaggtataatttccactaccttatcttgaataacacaaacaggttcttctttactattcaaaacaatactccactcacctacttggggtagtttttcatttttatcataaaattcataggcagatgtggtagctgtttttatccttcggtttaccaagtcagccaattcgtctgcatcttcagcagttgctccaaaagcccatgcttctaccggagtatcacattctaagttatgtttttgacaaaaatcttcccaaaattgtttcaattgtttattcatttttacctaattttgttaaaactttcgatccaatctctagccccgcactgtgagattcatacccccagtcgcgttcatcatagttttctatatcagccaatgtatcagcagtaaataaaatttgagcgaaatccacttttctgaattgcgcacaagccgccaaagatgcacattccatttcaacagtagcagctcctaattgacgaaagtgtgcaactttttttggcgtttctctaaagaagccatcagttgtccaagttgtaatttcatcatatttaagatttaaagtagctaatacatcttctacctgttttaagaaattctgattcaaatcgataaattgacctggctccatataatgaaaagacgttccttcatcgcgaattgcccatttgactagtaacatctcattttctggtaaatcagttaacgcccccgcattaccaacagttaaaacttgtttcacgccataactaatcaaccaatcaagtaattggaccgaagccggtcctccaagcggtgcttgacataaagtaaaatattcaccgtttaattcaacttcataaatcttaggactaaaagatactgactcaaattcacctatagtgcggtgaagatgttgatctaaaaaagcatcaatttcatttttaggaacaaatgcgtaaagcaagcgtgagtgaaaacgaaatggtgcctgatcatgatctggttcaattactgcatgatgatttgagtcaaagtttaaaataaacggttgttctgttttttctgtcataattatttctccctattttggacttaatttacttagaactttagatccaatttctaatccaattccatatgatttacgtccccaacctcggcgattgtagttttccatttgtgctaatgagtctccggtaaataaaagttgagcaaaatctacttttctaaattgtgcgcaggctgctaaagctgcacattccatttcaaccgtatcggctcctaattgacgaaagtgtgcaactttttttggtgtttctctgaaaaaaccatcagtcgtccaagtcgtaatttcatcgtatttatagcctaattctgaaattactctttcaacttgagacaagtatgcatgctctagttctacaaactgactaggttttaagtaataaaatgaagttccctctcctcgaattgcttttgtaggaatgagcattgtattttctggtaaatcatttaatgcaccagcattaccaatcgctaaaacttgtttaactccataattaattaaccaatcaagcaattttgtagctgctggggcgcctaatggtgcttggcataatgtaaaatatttattttcaattttgacctcataaattttaggtctaaacgaaatagtgcggaaacttcctagcgtgcgatgaggatattgatctaaaaaagaatcaatttcttctttaggaacaaaggcgtaaagtaatttgggatgaaagtggaacagtaagtcttcaaaatctggttcaagcacggcatgatgattcccatcaaaatctaaaataaatggttgtcctgtctcttctttcatacctactccttctacaatttttgtaatatctcaaagcaaatttctaatccacgccgaaatgaaatttaaacggttgtttttcataatcgggttcaataacagctttgggatctttatctatttgtaaaatacatcgctcttctttcatacatactcctattcaaaaaatggataatcaccttgatagtaatgctcaataaactttaaatgctgcttattaaaaatatccggtaaattatctttaggaaaatattttaactccaatgtttctgaatctggtttcttattcgttttgcctactagctctaccaagaattcaattacgacagcttgggctacatccccattaagataatgctggataaaatctgtcgaaattcctagcaaagatttaactttcactttcaatcctgtttcttctaaaaattcacgcacacatgtctcttgagcagattctccaaattccattgctccacctggcagaccccatgacttaaaatctgaccttttctgcaacaaaatttcatcttgatcgttaactaaaactccaccagcaaaatttaaaattagtggttcatggcctacctttttacgcaagtttttaatgtaatcttgttccatctatttcttctcaatcgtgtctaacattgtctctccaatatgtctgaaagccagatcctcaattttttcagtatagttaaaaatgcccactgcagtagtaaaaatcaaatattgttttgttaagtcagataagtgataattaggattctcacttgaataccccgccagaaatgattgaatcaatccttcatttaaaccaaagtcttggtaaaacagttttataaaatcttgatatactggccctaaacgtgctttttcaaagtcaataagtgctagcttactatcaacatatttatagtttctaaggcccacatcaccatgcaagacaaattttgaatgttgagataattctaacttaatttcattttcataaggtagaaatttactagtaagtttcttcaatcttcttttgtatgaactttctttaaaagaatctatttcagccagataatcatcaaactgtccgttaacaagtttaattcttataaatggtttcacctttaaatgatactctcctaatacttgtcccatctcaaaagccagattcgaatcaatcttttctcctatatcttttggtgagcaatcttttaacactaaaataaacgtattattaagagaaaaaccgtctaaaactcgatcatttaactgatttgtaaccatcttttcagtgtaataaccttgctcttttgcaaattgttttacaaaaatcgattgccgatataaattactatagccaacaaaagtgctgttaagtgattcatgattaattgcgtgtaagttagatttcaaccgcttatttaattgatcaatgattgttgacatagccaatatccttcataatcttttcaatttcttgccttaaagttgtttgactagaaaacctagtttcagaaataaaatttatataatctttttctttccaccacaaacgcatttgtttttctctaaaagaactaatgtgcctttgttgatgccgcaatattgtttcttcaaaaggaatattaaaatagtaggcaaaaatttcatcaccaaaaagttgttgagctaacttaaacaagggttcataccattccgcattcagaattccttctaaaattacgtaattacaatattgatagccatattgaaggaggtctttaaataatggcaaccctaaagtgttttttccatccttaactcgcagcatatctcgtctaactgtatcttgcgaaataagtaaggtatttcgtggcaagcgattatggatttccctggcaagagtagtttttccactaccagaattacctctgatgataattaatttaggcaaaacaatcacttctttcttaaacgtaaatttgctaagttattccttctgctttatcaacggaattattaataaaacaatgctgaagtaagctgctgatacaaaaaacattacttttaaatttccagcccacttcataattgcgttacttacaaataaagaaagactgactaaaatttcagcaataaatgaaactgtcgaaagcatagtggatttgttgctttctccataaattgcttcattactagtagcagaaatctgtcctgacatcatccccattaataattcaattaatagaaaaagggtcaacaacaaatatttattttctataattccactcaaaacaaacaccaaaatcatgcacactgcatttaatatcgtgatacttcttgaactagcaaatgttgatatcctattaaatatgagtgagcctaaaataagtgcacacataaacaaggtatagacaagagataagttaaagcctaatttttcaacgtagataatcgaccaatatattagaataaattgcgttccacaatcatatccaacattcagcaacaacaatatccagaaatttcttttttaaagaaactagcaatatttttaatattatttttccgcttatgtgatgccttattatccgaaaaagataaaaactgtatcatgaaaaaaataaacgcaggatataatcctaagccaatcaatgcaaaccaaactggtgcagtatctgtaattgcaaagagcccagtgccaatatttccacctattaaggtggttaaatttaggatgataacttgcatccccattaatttgctattcggagaaagatgattttgctcttgcaagtcagtcatataggcaatgagtgtcccagaattaagtgcaagtccaagtccatataagagttccgctaaagaaaagaacaaaaagtttctaaatagaattaggattaaaaaactactcgcaataactattgaagataaagatagaacttttagccttccaattctatctgctaaatatcctgctggtagcaaccctagcatgataccaatattttgaaaggattttattgaactaatattagcattcgggataccatttttagcatagaataatgaaaatattcctgacattgatgatcggaatagtgtaaacactgccgtaaaagttaaaaataaaactgcaattttaaagcttacactttttgatttcataatcatcaacctttcagtttctctatccttattcagcaacatctttcactatatttgcaatctctcgcgggtattcaaaatgaatatagtgatatgtccctaatgaaacaactttagaattttttgaagcatattcagaacgtttatattctttttgacgatactcttcagtaatcaacacactagtaatatcgtcatctaattttagatcgtttttccaataggaatcattttcaagagcagcttgggcattttgattatctttttcatcgaacttctgcacattttgctccgtagtatcccaaaagtctttattttcttccggagtaagaatatttgataaatcagctctaatttgatcttctaacttttccatatccttgcttttttcaatataagcagcttctttaggcggattcaaaattatttctctagtagttggttcaattccaacaaaagccttcaaattatttattttatctttcatcggcatcatataaacaccaccgatgctatgagctaaaataataactctttttgctttaaaggtattaataatacttgctaattcattagcttcatcagcgatggtatagccttttagcgatttaccactgaaaccactattcaaataatctggagcaaatatcccgtagttttctggtaaagaatctattatctttaaaaaagattgtgctgtatcaaagctgccaaagccattcaaacaaacaattaatggctcaccctttcgatacacaaaattaattttacctaattcagtttcaacatcttttcgttgcataaaattatccctttctattcaaactccgcttgccaatgtgaatcacgatatgccttaaagcacatttctacctgctcacgtgatcccttatcttcactcaactcgggtaaatcctctaacgcaaaataaccacttgcaatagtttcgtcgttttctttaaaacctccaccagctggcttacataagaaaaatactgtactaattccataaggatacatccctttatagtgcttattactatcatgaattgcaattagcttttcaaccgtaatatcaatgccagcctcttctttgatttctttaatcacattctctttaactgataaatttatctcacaccagccaccaggaatcgaccataagccatcgctttcttggaccagcaacattttattatctttaaaaatagctgcccgagttcctatcttaggagtttgatagcctacttcattacaaaatagattttttaccttctcaattggtaaatctgacttctcaaccatcatttcagctgaaatatctcgaatttcttgatacctctcaagatcaaaactatcttttccatatgttaatccagcttgcgctaagctttgaagacgcatagcccaatcaacaagtttatctgtcattattttcaccacctaaatcgagtactaacacaatttcttccccatctttttctccattcggaacaaacccagcttctttgtataatttttccgcccattcgtttccaggtacataggacaaatatatttttttaccttcgcctagaggctttgctcttatataatcaataagtttatttagtgcttttttgcccaatccttttccttggtatctttggtcaatcataaatcgccagatacaataattattacgagctacttttggtgctccgtcccaattgaatacattaaagttaatcatgataaaaccaactaatatatctttttcatacacagcaaaagtttcaactcgttcattttcattctgagtagcataagcttctaataaactaactgtattagtcgcaacatatgtcttttgatttgctttaacttgaagattgacaacatcccataaatttttgtttgttatcttcttaaattccatacctgttcctcctgattttactcgttcttcaatacaaagactttatgatcattttcatcatctttcatatattcaaatcctgcacgctgagccacatgttgactagctaagttatcttgagctgttcgtaaaattaaaaattctaaattcagctgtttaaaagcatactctactaaaaactcaaccgatttagtcataattcctaaatgctgagcatccccagaaagccaataacctacttcacctgatctttgattcaattcgtgcaaatcaatcattccactagggacaccctcaactaagataactaaattgaatgcctccccagcaaccatcttttcttgaaacattttaattgatgcagcttcatctcgggcagaaccgattttttcaacccactctaagtatttagaaaattcgacaaaattcttttgaagttgatcaaacagagaagcggcttgccagacttctggtaaaactaattcaatcttcttatttccagttgaaaaattatgtaaaacaaatgcgatatgtttcatatacgcagctcctcttctcttaacggttaaattacattaaattttacttaagtacatttaatatttcaagagtaaaatcataataattattcataaaaaataagcagagatccactaactaatctctgcttatcataataatatacttttattttattaaaaactcaccaactaattttaatacttcaggtctattttttccgttaaacatgtgaccctcatctggaattaaatggagctcacttttaggcaaaagtgtatgaaattttcttgaagcattaggtgacacgactttatctgctaagccatgaatcaataaagtttccctattataatgttccgctgtttgataaataggcaataattgagccgttctaaagtaagctcctcctacttcaaagccactaacattgacagtttcagggatatgcgttggatcataagtactaccctgacaaactccatctaaagcatcagacttaagagttgctgcaggagagagtaaagccaatttttcaataacatctcgataatatccagccagcattgacgctactactccaccttgggagtgtcccactaaatagatatgttttgccttaacagtattacgaacataatctaatatttttatcccatctaggatttcgctatagacagtcatatcttcaaatttaccatcactttttccgcatccatcaaagtcaaaacgaattgttgggaggccttgatcatttaagtagtgagagagagcatacaaaatcttgctgtcatcataacccaaatcacctttaaaaccatgcattaaaatagcaatcgtatcattttcaatcttatcggttccttcaagtaaaccatgtaagtttagaccatcacgtttaattgtagtctccattttcttcacctcaagttaattatagtttataacttaggttcagcgtaattgctaacgattaaatagacgagaaataaaaccttttttcttattttcttgctctttttgttcagttaacttttcaactgcttcttgcatcatcttattctgctcaacttgagctttaagtaaagcagccacattatcttgctgcttttcatctttatgtattcgttcatagtgctttctaattaatggctcaccaatgaacttatcaaacttgtcaatatcaagacgcattccattaccgtattgctcaattgcaataccgccttctcgtgggaacatattaaagtaattatctagagtttgattaatattctcatatccattggctttaaaatcattaaaaattgcttttgaaacatggaaatacttatcatctccatcagtaaacgcaatatgttcataatgatcatcaagaattaacattttccacgtaatacgattgcgatcaattttataatcgtagttagctcctaaaatattctttaagcgattataatagccatatttcttcaaaaggtttcctaagatttctttagttaagctcaaataatcttcaattagatttgcctcttcttcacctgtaagatgtactaaatgcttattgagttcagaaactacatagcgataaatatggtcattattatcattaattaacatattatagttaatttcttgttgatttgatggaagccatggagcttcaaaggataagtaatatacacgcttggtaatttcttcaagattgttaatttctttactacctgcattatggttcatcgcaaagatattaacattatgaattcctttaatagtattagaccattgcttaattgcattaagggccactttactatgtaaaaaattactattcaattcatcgacaatcatcggagaaataaaacgctgagaatgcaaataattatctaaaaatctaactgctttatcggttctagcaccattaccatcattaatttcagtgtattgcaaactatgagacttgtctccagtaaattttttaaaataatctcgtactaacaatgttttcccagtagttcctcggccaattaacaccatcgaaagaggaatctgatcagcactttttgaaaaattagatttacgataaatttcacgaattttccaaatcattggagcagtcatcagataaataaatgcagaaagtgcctggtgactttcatcttttaccttattcaatttaaagctttcaataattctaacaaaagtacgaacatcatcctcactaactatgtccgaattaacttcaagcgaatgaaataaattagtgttggtatcttcaacaataatattattatcttgataagcccaaactggtttaggatatagagtgctagcttttattacacggttttgagatggatcactaaagtcttgatagacaattttcttaacttcttcacggaccttttcttcatttcttcgtttattgcccttttccgtaaagagttgcttagctactttttgaacagtctcaggatggagctcataagtttcttcttttctatcagcatctttagtaatttttacaatgtcatccggattacttcaacaaatattttgttgaactttatctactacttcatctgcaataattgcagtaatttgctttttagttttaccatatagattattgataatttttctatctaagtaatcaacactatcttcttcgaaatttttcttaaaaagcttttgatgctcttcatagatttttaaatcctgtaaatcatttttcttaccttcatacatccaaagcatttcatgattctgttttaaagctttcttagtaagattcattgaaccattgaaaataatgaaatcagtattattttcaataatgaaatatttactatgaaaaagtttatccttagtgaatcttaaatttaaagtttgattttcaattcgatctaaaaagtctgaatcccgacttaaagacaatagctgctttactttattagagacatttaataattgatctaaattcttaccagttttctgatcttccatccctaaaattagatcaatctgtttaaagcgtggcaaaagctctttctctattattttaaaacttccaacaaaactaactcccttaaaagagtcatatccttcgaccaacttaaagaaatctggttgtttaagcattacattattctttaaatcataaattgttagcatatttatcccctttctttctatttttttcgcacatatgttcgcattttattacgtagaaattatatcatagtttttaagacgaaaaaataaactaagaataacttttcttagtttattattatctttaattatttttccacgaattaacaaaaaataacaactgcagttacaataccgattatcataattaatccaaaagtagttaatttactgaattttcttgttaataaaaggtaagctaatattatttgaatcagctctgcaccaatctgaattatattaaggtggactcggatactaaatatccaacaaatagtcacgatcgcaattattgcgataccataccattttaaagcgatattttgaaaccaatcttgaaaaataaaatatacgctggctaataaataagggacaagcatatgtacttctaattccatttatcttactccttttgtaaactccgttctgtctaatgactcttaagttaaaactatgatctgaaattatgtattactttacaaagatactttattttgtctaaaactcaccttttctctaaataaagctcacgtaaacgatctcttaattcaggtgtcacatccaacacatttttcaaatatgcatccatattatgatactgctcttcaattgtgagtgaatatcgtatcaaaaaaggaatcagaagccgagctcaagattcgcatattactcctaaaggtaaggttttcacctgtattttcaaactttttatcacgttctgctcgataagcagaaagaatggaattagacgctaagtaatcttgacgaattacttctaaatcaacacctaaaatatataaaacaaataaaactacaaaaccagtacgatcttttccttcggtacaatgaaaaatagttgctccattttctttttcagatagaatagttaaaacttgacgaactgtattttgatcatgcgctttaacaacatggtcgctataatgatcacacatcattttaaaagcggcatggggatcatgatggtataaatcatcttctcgtgataaatcttcaatcccacctaaagtcccttcttcttcagaaagaggcaagggaatatttttaacaccttcaatttgcggatcggggtggtctttcctttcactctttgatcgtaaatcaatgattgtcgttaaaccgtaattttttaaaaactgaatatcctcatcagacatgcgggtaagggttcccattctaataagtcggtgtgtctttatctttcttccatctaatcccactattccacccaaatctctgggattaaggatactattaactggcaataatgttgttgtcatgaatcatcctcattaattatcttctctatttctggcgcgattaaactttgttgaactttcatatctactggatgataggttgaatcaatacattcatcccaatacttaatatgttccttatctatataactttctgattcttcaacattctgaccattctcgccttggacagaataccagtaaaaatatgtataaccatcttcattcttttcactaaagacagtctcaacatacattttttcagcagccattgttttaactgtatcgacgtgatgctcatttaagaaattcatccactcttgggcttttctctctttacctttcttaatccgaaagcgagttaattcaatttgtgtcattttctatccttcaatcttttttccatcaatgtattttcgccttttattaatttccatctttttaagaatatcttcaccaagatcgcttcctaccatttctgaaattcctaaaagaaaaattgcaacatctgccaattcttcattgatgttctccggatcatcctttagccacgcctgaaaaagttcatttacttctccatataatagaagaagttcaaacttaatatcagtagtattaaaattatggtttttcttattttcaaggacagctttttgtaattttttagtgtcaataagcatttttaatccttcatttatacattttatctaattcaatcttcaacttttgctttagttcttcaagctctttatcattcaatacattctctgcactatacattttttctcgtggataccaccatactggccccttgccatggtagccatattctcctaaatctccgctcactcttggaaacaaatgccaatgcaaatgagaatcaccgtttcccagcaattcataattcattttttcacattcaaaagcttttgagactgcttcaccgactaacgacatttcttctaagaaagcttgcctttcagtcgaatctaactcatatagttcatttttatgttttttataaagaaaaagcgtgtagcctctaaaatactgattatcacccaataccacataacctgtttttaactctttcacaaagaatttattttcattatctttaatcatttcaattcgttcacaaattagacacatagattttccccatttcttgtttatctcaattccatcgtgtcctgtgaaaaagcgataggaaattcatcggaccacttttcagtaagtgtatttactctctcaaaaccaaatttcctgtataaagcttttgctcgttcattatcagtaaatacttctaatctaacgggtctctctaactcagttaaggcttttttaattaactcagtcgcaatccccttactttgataaattggatcaacataaataaaacttaactctctcggctgaaaaccaacaaatccacctaatactccatcctcaaacgctacataaattttacaagacaaaaaataatctaaatatggtgcatcccgtaatggtagaaaaacctcctccaaatcttcactctgaagttcttgttttcttgctctatccattactaagcacaactcattaaaatatttttgttcataagatttgatctctagactcatttttaacctaattctatttacattaattatttttttatttattattaatctaacataattttatatttttacaataacgaattggagatgattgaatgaaaaatagagttaaatatatccttgcattcgttttttcagttttttgcattggtctattgatctttgcagggtatttacaaattagcgaacatagatacaaaggcctcggttggtatgctttagctatcatagtcttacttattagtgcttttctttacttgagaaatgctattaaaaatactagtattgctgacttaaataatgcagaagacaatgatcctgatctaaagctgctagaaacaaaatcaaaagcaaaagcctttgatattatcagtaacaccagtttttggtgtggtcttgtattaatgatttatgcttcgagtcaattacatgaagatcccccgttttcatacattcttttagccatttctggtacaacaacagtagtttggctaatcacagtattagttcaactcttttatgttgttaaatatgagagacaagtagatgacactaaaaaataaatcattaattttaaaaccatttagcttacaataacgaattggggatgattgaatgaaaaatagaataaggtacattcttgcggctattgtttcaataattggtattggattattaatatcggtatcgtatttacaaatacaagctcacaattctagacaaattatttggtacataatagagattatcattttgctcagtgccgccttttattactttagaagcgcaattaaaaatactagcgatgataaaggtaataaagatgcttctaagttaaaaacaattgaaacaaattcaaaaataaaatcattagactttataagcaatctaagcttctggggtggcattctattaatgatctatgcctcacatcaattaaaagatgaccctcaattttcatatatactttttgctatttcaggcactttaacaataatttggttaattaccttagtagctcaacttttttatattgttaaatacgggagacaagtagatgacacagaaaaataaactattaactttatcttcctttaattcacagtatttaaaacatatttggcgagacggttttcaagatgaaaatcctgaatggactaaatggaatgcaccctattttaatgattatcatgcttatccttctttttctcagtttgaacatagtcccattactgactatctactaagcaattcttgtaaatgcatctgtttggatgaaaaaggcatcggaatggtttcaaaaaattggatagatgaagtaacccgctggcttgaaattggcatagttatttataatcccacctattggcatggtggaataggtggtcgagtactaaaaatatggatatctgaaatttttgaccaatatccagaattagagcatatcggattaactacttggagtggaaacccacgaatgatccatcttgctcaaaaactaggttttaaaaaagaagctcaaattaggaaagtgcgtttttataaagaaaaatactatgattgcatgaaatacggtattttgcgtgatgaatggattaattaaaaaaaggcagtgattttatctttgaattgctgcctttttctgatattaactttttagctattttatacctatcttctacattattaacaacctaatttattcgcaaaggcctcttagattcatcaaaaatgttttatcatgtgttataatgtggttaaacgtaatacatttgaggtgaaaattatgacaactactgtaagtttgagattaccggaagatttaaaaaaacaagcaactgatgtttttaacgaatatggtcttgattggtcatcagcaatgagaatgattttaacgcaagtagtaagcgaaaacgctataccagttaatttatcaagatattcagatatttctccaacaatgaaatctaacatagaaaagtcactccaagaatacaaaataggagattacaaaactgcagattcagtagatgaattatttgaggagcttgataaagattaatggcaaaaatcaacttcactcctcaatttaagcgagattacaagaagctcaaaagaaaacactacgataccaataagttgaaacatgttatcaatttattagttgaagaaaaatttgagattcttgctcaaaaatacgatgatcatcaattaaaaggttcattcaagtctatgcgtgcgttgcatgttgaacataataaagctggaaattgggttttagtatataaaattcataaaggtcaattagaattattaactattgacttaatttctactggatctcacaatcattcttatagaacttaaagcatttgaaaaatactctaactaaaaaactgatacatcaacgtttatttaacaatgatgtatcagtttttttgtcttctaaagaattaacaattaaaaccgtatttctacttatttccttactagttaacttctttattggtatatgatcatctgttgattttatatgtttacttcttctatttccatagcccaattctactccttattattaattgatattataaataactcctactaagctaaataatgccactccccaaaataaaccaacaaccaaacctaaaaagaaagttactggtccacttaatctcttgatcattaatttataactaaaaacaatcatcaatgattccgaaataattgcaacttcattgacatatgatttcaatccaactaaaggaaaaatcaaagctaagcttactgtaaatattatcgcacctacataccatttccatgatattttcttaaacaagtcttgaaagccccaaaacaaaaaggcaaataaatatggaataaaggtatgcatatcgatccaagtattcatcttttcacctatttctattaacaaactttttgattatattaataatttataacattttttgcagcactttttataattttattttcataatttaataaagtgtgctaatattattcttatcaaagaagaaacgactaaataagtcactttgatggggtctagaaaggtatattatgtctttaaagtttgctaacaaaaagaagctagcactttatgcccttttagcctgcataagtgcttgtggtaatgtcgtcatcgcttatgtcacaaagataatgttgaacagtgcgcaatatcatcgtggtacattaaatcaattaatttttattgctctttttggagctcttaccttaattatcattatgttcttaaattttgaatatcgttatttacgtttcgatattacacgggatattaatattaagctcaaggataaaactatcaactacttagtaagtcaacaagctgattcacaaaaagagggtcttaatttaatgactaatgacctaaagcaaattgagttacttaaaaccacaaacgaattaatgattatctctgagatagcagcttttattatttcaattgttgttggattattaaattcttggctattaacgataatttttgtaattactacaattattccaggacttattcagaaattatttgtaaaagatattcaaaataaagctagcatttgggaagaaaaaaatgccgaatacactcaagccgttaccgatgctattaatggttcgaaaacagcgatgctctatgatgttgaaatgccgcttgtttcttatgtaatcaaacaagcaaaacaaatggagaatgcattgcgttctttgaactatacccagggagctatttctactttaattattacaatagcagatatcttcagctttatcgttccatttttagttggggccattctaatgttcaatggccaaattggcgctggtacattagtcatgattgttcaattatctaatgactttattaatccaattacaatgatttttgatcagattaaccaaatacgttctactaaaccaatctgggacaaaatcgaaaaggcactacactcaaaaaatacatcccctacctcatcttttttatccttcaatcaattaaagattgaaaatttaacatatattgtgaatgataaatcaattttaaacgatgtatcctttacgcttgaaaagaacgaaaaaatattactaatggctccaagtggttttggtaaaactactctcttacgcttgttagtaggacagcttactccaacttctggttcaatcattatcgatgatcaacatatagaagataactggaacaaagcacatgaatatttcggttatatcaaccaaaagccatttatatttgatcggagtttactttttaacttaactttaggtaaaaaatattcaaaagatgaattaatgaatgcgattcaattagccggactgacagaattaattgacagcaaaggatttgactatcgagttggtcaaaatggtaataatctttctggaggacaaattcagagaattgaaattgctcgagctattttagctaaaagaccaattttacttgctgatgaagcaaccagtgcgttagataataaactttcattgcaaattcataaaacacttctaactaatcctaactttgcagtaattgaagtagcccataaaatttctgatcaagaaaagaaacttttcgataaaattattgatttaagtaaataaaatatagttaaaaaggtacagccactatatatagcgtcactgtacctttttactatattttcacttattttctaaccactttataacgattacgtctatcttctacttgttctttgtcggctggataaccaattggcacaagcacagtaggttcataaccctcatccattcccaattctttttgaagttcaggaaacttatttagtgcaaatactccacccattacataaactgatcctaaacctaaatctgccgcttctaccattacattctcagctgctacagaagcatccctttcaccaaattgactgtcctttttagtattaatcataaatatcagtggcgcattgtaacaagaattgtttgtattatcttctatctttttaagtagttctgggcttgtaatgacactaagttccatgacatccgtttgatgcatggcacaaggtgaagcttgaaacgcattaattagtttttgaattttttcttcatctattttttcatcagtatattttctaactgcttctctttcaaaaattgcgttcataattttctccttttaaggtgaaactatttaccatctatataagtttattttactctctcatagagaaattgtaataaaagatcattaattgaagcttttgatagttattttttcttcttctacctatctttgttagaatgacggtgaaagcaatattgtcaaagaaaggacgataattatggatattgaaaaagaggtatctaagccaatatttaaagccactttactagcaatttctctctttattatgatgccctctgttatttccccggctcttcctctaatcgaaaaggcattccctaatattcctcgtgttactgttgaattacttactactattcccaattttggagaaatatttggtcttttaataaatccttttctagttaaaaaaattggtagaaaaaatgtaattttagttggattagctcttgttggaatttgtggaacattaccagtaattattaatagtttttggctaatatttattctccgcatcttacttggtttagggattgggatttataactccttagccgtaagtttaattatgatgatttatgaaaatagtaaaactgaactcaatcgcctattagggttccaaaacattatgaacgatgtgggctacatcgcttctgcctttattatttgttatctagtaacattatcttggcacgctgttttctgggtatacattcttgccattcccgtattttttatgtttgaacactttattaaagttcctaagaaaactaagcattcttctggaaaacatttttctctttctaatataaaacaagcttttaatccaaacattatttaccttagtattcttaccctactaatttacattttctacatggctcttgcttacaaacttcctagtttcatagtagatttccatttaggaaatgaaagtatggcttcattaatgctagcaataattgctattactggtattccatgtggcatcgcatttaattggctttatactaaactacacaagtgggtatggattctatgtatgcttttaaatgcacttggattttacttaatcagtagtgcaagaaatacctatgtgctagtagtgggatgtattgtacttggagcaggttttggaattgtgatgccatacatctttaaggctatctccttaagtgttcctgaccaattaagtaatcttgctactacgttatgcttaattatgatggacattggtgctgtaatttctccatttgttatttcaatcatcgctaagaattcagataaagctctactttcctcagctatcttctttggaatcgtaaccttaattgaaattgctagaaatatgtacgccaatctaaaacataagtattaaatactttaatattaatctaaaaaatgctgctgaatctaaaggttattaggccttgatttagcagtattttttatcactcaaacttttaactaatcaaaatctacattatttggaaaatgattcaatctttcattttcaacaccgatttgattttcaatctcaagtaatcgattatatttctctactctttctgatcttgctggtgccccagatttcagttgacctgcattggtagcaactgtaaagtcagcaataaatgtatcacctgtttcaccggaacggtgagataccatcgttgtcatattgttctttctagctaaacgaattgtttcaagagtttctgtaatagtacctatttgattaagtttaattaaaatagagttacataatttatccttaatcgcttttctaacaagtttaggattggtgcatacattatcatccgcaacgacttgatgagtagagccaaatttagcagtaaatttttcaaagttctcccaatcgttttcatcaaaaggatcctcgcaagaaataatctctgggaattcttttaataatttatcataatattgaagcatttcttccccattccagatatgaccttcgaaatgatattttccatcttcagtattatagaaagaacttgctgcagcatcaaaagcaattgcaatgtcttttctaggtttataacctgctttaataatagcttttcgcagcatctttaaggcttcttcagaactattaaggtttggagcaaaaccaccttcatctcccaatccagtttcaaatccagcttcttcaattacagcttttaatgcatggtatgtgttaactatcttttcaaaaccatcacggaatgaatttttagcaacaggagtaatcataaattcttgaatatcaattccattatcagcatgcttccctccattaattacattatgaaaagtttgtggcatttctaactcacatcccccaagataacgatatagtggttcatcttttgacctagctgctgcgcgtgcaattgccattgaagtacctaagattgcattagctcctaatttagctttatttagggttccatctagtttaatcattgtccggtcaatctctgcctgattgtaaggactcaagcccttaagagcatcattgattggaccatttacatttgtaacagcttgagttactccctttccttgaagacggttgccgccatcccttaattcaacggcttctttttcacctgttgaagcgcccgaaggaacttcagctttagctactgtcccgtcagataaataagcatgaacttctacagttggattgcctcttgaatcaaaaatctctaatgctctaactttttctacataaacagtcatttcaaatacctcctgatatacaaaaaagagcaaaataaatacgacccctaccacccgctactcaaaaatagtttgtaggaagtagacgtcgttagattttgctcagtttaattggtgaacgtcatcacctattcaatttacactttcatcataccagcattctttttaaatgcaagagataatacaaaataattccacttatcgtcaatctttaactaaatgaatttcacgatcaaataatgcacgcatctcttgattaaaattatgtgctataaaaataattgtctcttttcccttaactaaattctttaaaatattcatggttgccttttgatctatcgcactagttccttcatcaatcaaaattatgtcacttccatgtactttagcccgggctagaacaattttttgtctctgaccgcccgaaatatttagtttatctagatttaattgatgctctaatccttccttgaatttagaaatatcattagcgaaattaacctctttgattataggctctacttgagaatttaattttgaattaaacatagtaatgttttcttcaatcgttccaggaaatagatttggatcttgtggaatatagccaatcttcgacatatcaggattaatttcttttccatctttatctttaaaaataattgatccttgtgtcggttttattgaacctaagatcaatttaaacaaggtagatttcccagctccggaatccccagttaacaaaattttttctccagattttatttgaatatcaggaaaacttaacttctcaccatttggaaaagctaaagctaaattctcagtagaaattagagctggctttttcttctgaatatttgaattattctgtagtggtgcagaatcaccactaatttggtccattagttcttcagaagatttcataaagctcaatgcttggatcatttgttgcaagccaatggaaatattagctgcaaaattttgtactgacatgattgcaccaaaaagtacttgtccttgagtgatcatgtatccagtcagagaaagaaggattaattgtcctattgagttacataatccatttattacaattagttcttgctgggtacccgtttgatgaacatgcgctttttcaatcttattagctgcctggctctgaacttgaaatagcttggcaccagcaaaatatctacgtaattcttcaactccagaaaaccatttttccaacacatctaaataatgtttattttgaacagaaacattggttgtcgccttttccatctttttctgaacaagtttaggaatatagtaagatgcaatatcaatcaaaatacttacaacaaaaatttgccaatgaattgtgagtaaggcaactaaagcaccaacaaacattgttccataaaaaggaacgataatgtaccaatcaaaataattttctcttaccatctcaaggtcgttagtcattcgattttgagccgcagctattttgtgatacttattgtccttaaagtaatgactagcaagattattacgaatttttttattatattcctcttcttgaatgcgagtaacaaactgaatgtaataaattaagccttgggctgctaaatataagactccgatagcaagacttgtccataacactcccatccagtttttattcttgatgaaagttaaccaatacatttggacatatcctgcaccaattgcgcccaatccagaaataatggataaaaaattgatataaataaatctaaggtagtttgtcttgataaatcccttaaagctcatccctaatcacctccatttttcaagctgatttttcgatcaaacaggttctctagctcatcattaaaattatgggcaatcatgacaatagtagtttcctgatcaagtaaattttccaaaattttctttgttgccttactgtcaattgcacttgttccctcatcaataaagagccattttgatccggctaaaattgctcttgccaaaacgattttttgcttttgtcctcctgatagatttccttcatctaaattaatttcatgctttaaaccagctgggatttttttaagatcattttcaaactcaacttgtttaactactctttttactttctcatcaagctttgaattgaacattgtcatattattttcaatagtatcaggaaaaagagtattatcttgtgctacatatccaagttcatcccgattgagtttaatttctttaccattcttatcttcaaaaatcacttggcccctagttggtgataatttacctaagatcagcttaaataaagtcgattttccactaccactatcgcctattactaaaactttttcaccactttttaatagttaaatctggataagaaataagttcaccattcttaaattgatgctgtaggccctttatctgtaatttagctacttttttatcttgatgctcattttgtaaaggtgcgctcgcgccttctaaggaggttattttttcatttaatttctttgatgatttaattagattccactgagcagcaaattgtgcagtcccattcataactgttgaacaaaattgaattgttgtaataacggcaccaaagactatttgcccattaaagtataaatatgcagccagaatcatcaagattatctgtccacctatattaacaatagaggtagctaagtcggcaatagcaatagttgcaccttggtgaatagcagcctttttataattatcagcagtttgattcatggagtcagaataaattctaaaactactatatcttcttaattcatctaagccattaatccagtttgaaatcgcttttaaaagtttttcatttcttttagtgacttcaatcgtggcatttgaactcatattttcaaatgcctttggcaacaaaagtgaaactaaagttaggataagcgttaataaaactaagctccaattgtaagaaaataacactactattgaaaaaataaccattaacccatctaagaaggcagctttaattggctttaaatagtttctagttaattgatccaagttagcagctaaattattttgaactgatgctgtatcatcaatttgcttcttaaacaaatataagctaatcttttttcttatttgatgtaagtaaccttgactctgtttactgtacaagtagtccgaacccgaacccaataataaccggcaaatatcacagagccttgataaagcaataaagattacaaagcctaaaaaattcaaattctttaaattattaaatgccggtgtcatcaaatactgagaaagggtatctattacagcagcaagtattatcattaacaaaattagaataaagcgacctttatttattctaaatattccgcttagcttcatccttaacctctccttttaatcttttatttatattttaatattactgcgcaggttttaatttacaagctatttttattaagtggtcaaaaagataaactaagatgcaaaattatacaagttaagtggcatagatcgccaagtacgtgcattttcactgaaaaaactatagtagtattttttatgcttacataaagttattgcttaaaagttactatcgatacaacaaaaatgattaaataatctttcatttttacttaaagtattagataatatcattaaattcaattaatggaggctatagggatgacgtatgtttttataggagtaattattttattaattcttatctattttttatgtggtttgcgaatcgtaccgcaaaattatgtcggtttagtcgaaacgttaggtaaatactctaggacggttaaagcgggtttagtttttatttggccaatttttcaaagcttgagaaaggtaagcttagctttgcagcctttagaaatttctaaatatcgtattatcactaaggataatgctgaaatcacaaccagcctaaccttaaactatcttgtcactgatgcatacaagtatttttacaacaatactgactccgttgaatcgatggtgcaattaattcgtggtcatttacgtgatattatcggacgaatggaattgaatgaagcattgggttcaactagtgaaatcaatgcccaactatcaaaagcaattggcgatttaactgatatttatggaattcaagtagttcgtgttaatgtggatgaattgcttcctagcccagaaattcaaaaggccatggataagcagttaactgctgaccgtgaaaaaactgccgctattgctcgtgcggaaggtgaagctagaaatattgaattaactactaaagctaagaatgatgcattggttgccactgctaaagcaaatgccgaagctgtaaaaactcaagcagatgcagatgcttatcgaattgataaattacaacaagctcttgataaagccggcgatggttatttcagaaatcaaagcctagatagttttaaccaactagcacaaggacctaacaatttagttgtattagataaagatgaaatcactgatttaggtaaaatcccagctgctaaaaagatttgggatcaaagtgaaaattaatacgaacactaaaaaacttctaccattaaaaagtagaagtttttttgctctattctaaattgctgtccattttttgtgaaagaactgctactaaacggctattagatctaacaatataaattacttcatcatcactaacttggtctaagtatttcgttagatttgctctaaaatcactttgagttaatactaacggcataaatcttcctctttaatatgcataatatagctaattcatcagcaatatcgggtctataccctttaaaacttaagtaaacgaactatattttctgtagttctagccacattacttggtccatttttcaaagcagttgaaagatcacacgctccgggaataattccaaaaattgcagtgaagccttcactatataaactatcaattccttcccccagatagcctgctaatgagataactggcttatgatactttttacctaatttagcaactccatatggtgtttttccaaatttagtttgaaaatctgtgccaccttctccagtaaagacatagtcagtatccctaattttttcttctagtttggttacttcaattgcaagatctactccttgcctcatttcacaagtagtaaaagccattaaaccagctcctaaacctcccgctgctccagcgcctgacactgaggcaacatctttattcaaatcacgcttaacaattttagcgtagtgctgtaaattattttcaagtttttcaaccatttctggtgtggcacctttttgcagtccaaaaactcttgatgcaccctctttaccaattaatggattagtaacatcacttgctaaaatgatttttacatcttgcaatcttgaatctaagttagaaatatcaattttgtctagtttatctaaatttccgccaccaaaaggaatttgatgattgttttgatcaagtagttttgctcctaaagcttgagccatgccgctaccgccatcattagtgctgctgccgcctaatccaataataatttctttaacattgtgatctaaggcatccctaatcaattcaccagtaccaaaagtagtggttatcattggattacgcttcttcttttctactatctctaagccacttgccttagccatttcaattacagcagttgtcccattacctagaattccataatatgcacttatcttatttccaagcggacctgtaacttcaactataactctttgaccatgtgtcgcatctactaaagaattaactgttccttctccaccatctgccataggtactttaatcacttcagcagctgaatcagctttttttattcccttttccatcgcatcacagacttcttttgctgtcatactttccttaaatgaatcaggggctactacatattttgtcattattaagtcctctatttttattctctatgtttattctattatttttcactgtataatacacttaaagaatagtacattatgttttaactataagcgtaaaaaaatgaaaatcggacttattcaaggaacctcacaaaaagaaaaaaagatattggagcattacatcaaacaagccatctcacctgacgatgaattaatcaatttcggaatttatcaagacaggactactactttatcttatgtacaaatttcactagcaattgctttattgattaatagtagagcgcttgatttcgttgttactggatgcagttcaggacaaggaatgatgcttgcatgcaatacgttcccgaatattcactgcggctacatccctaccccacaagacgcctatctatttagccatattaatgacgataatgttgtttctttccctctcggcctaaactggggctggagcggtgaaattaatttttcagaaactatgaaggctctttttactaaaccttggggtaaaggatatcttacgggggaagcaaaacgtaaaataaaaaatactaaagaagtgaaagagcttaaccagctaactaaaaaactatgatttcttttcttcctgatctaaatcccgaactccttattccagttcttaattatgatcctgtttttgattttattgtaaaaaatggaacagatcacgaattaattgacacacttagaaaaatcaaaagtgaatatagtaaataatacttctaccctagactaaagcagaagtcttattttcatacggataaacatgcctagaatctgattgaaactctttcacagaaattatcttatttgcttcatcaaatttaataattgatacaccatcaaactcactaattctactcttataattacatttaaaataccattcaacaaaagctatctccttatcaatccaaatattcttaattggccattccaatacttgcccattcttattccaatctttataccaagctataatttcagctttatttctatagattggcccataacattcactataactagcatttttattgaaagtatcttcaaaatcttcaaagtttggaacaatccacgagttaaaatatctttttattatttgctctttactcttcattgtcatgcccttctatttttcaaaggattatagaaaaaggcagaaataaatttccacctttaacatcctatctttatttaactttaatcgccttactataatcaagtccctgcaacatctttgcaaaattaggacgcttagtctgcttatccattacttcacgtaagcctggcgttaaagcttgctctttttcttcttcatctgacaactcagtaattactttatctcctttacctgcaaccacttttgccgcaaaattagcatcaattatttgggccctcccagcagctactaaatcagtgtattttaaggcatcttcagctgtttcttgactcattacgtctcccacaataattaattttgtctcttttccaattaccggtttaaataatgctgcaaatgttttatcagagtctttcggttttgccttatagtccggtaatgataaatgaatatagtcaaagtcaaaattatttgttaaatcattaattaattttgttgattcgtgccaggtataacctacattacctggattaatttcttctggactaatccgataaccaataataaagtcctgtggagcatactttctcacaactttgaaaacttctttagccacagttaatgggaatgcttcgtaatctccccacttatcttgacgatgatttgaaaagcgagaaaagaactgttgaattaaataatgattggcaccgtgaatctctactccatcaaaaccagcttcaattgctcgcttagtcgctctaccaaaatctttaacaacttgttctacttgttcagtagtgaaagcctgaactccataaggtaaaaatggataattggcactatctggagcatatactggcaaccctaaatgtgcacgataatttgcttctcgtcctgtatgggcaatttgaagtagggccttattccctcctgatttcatcgtttttgccatcttagtcaaaccaggtaaaaacttatggtaaaaacttatcatcataaacggctaattgtgttctattatccgcccaagtgattgcaggtccacctgctgggctcacataattatattctgaaattactaaacctgcagaatttgcacgtgctttccaataagaaattgtatcttcactaaccatgccatttaacccactgttggtaagcatcggtggttgcaccattcgattattaataactgcaccatgtttaaaagttactttgtcggataattttttcataacaatgacactttctataatcttcttactttttattagtttatgattatagtatagtgctaatttgttcttacgtaaagtaagttatccaattattcgaatttcaaaacttcatcaactggatatctaactgacttaagttcttctacatttttatctggttttccaatagcaatccccattactggaacatactgctctggatcaagtcccattacacttgcagctttctttgcatcataaccagccattgcatttgtttcatatccatgtgctctagcaattagcatcaactgcattgcagcaagtgaagaatcaaccattgcatccgcagtaagcattgttttatctgcatgctcatataatggtaaaaatgtattataaactttatctagttcttcttttgagattctcttttctgcatacatttgatcccataatgcacggtacttcttaaaggctaaagtgttaccaaaaatctgaataactgcacttgatgtatcaatttgcggattattaaaggacatgtaaaattcatgtagtttcttcttacctttatcagtatccactactacaaattgccatgcttgtaagttacatgcagaaggtgccgtagttgcttctttaactatctctcttaattcagaccgagaaattttcacatttttatcaaaatgccgaaccgaatgacgattgagtaatacatcaccgaaattattgttttcaaattgtgccatatattttatcctcctatgtttattagcgcttacattgagtattatagtataaaatttatgatataaaaacgggatacaacatcttttaaaatgtatatccttcttctttttctattctgctattaataacaaagcttgataatctttccgtggtaaatgaatatatttatcattttcaacttcttgatcaaaatcttccactgtttcatcccaagcattaataagcttggcatgatatttctttccttttagcaaaaagcttaaaacttcaaactctggctgattttcgccaaaataaactaaccatttcttttcatctggtgttgaaccaactgctaattcccatgttggtccacttgtggcctgtggatttacccaatcaaagccattatcttttagtaagtcatataagaaattaattttcttttgactttcaccatataattttcctccatgagcccaccaaattggacgttttgtatgaggcttatcaatgtaagtttcaccatgagtacatcctcctccacgtaaaaccacacgccagaaattgtccatcatgcctttggcagtattgtcaccccagccaaattcaatattaccttcatagcgacattcatcatcgataaccggtttttgatattctttaatccattttggaattatgaaaacattgtcactttggatgcttaaatgtgtaatccaaggcttagtatgatcataccaattcttagttgtatctttatgttgaggtggatcatagaaattatgaatagattctaggtgttgtgatggatctttttcatgaacgaattcacctattcgatcccaatcttttaatggaatttgtcctactaagttcatcaaatcatattcatttgcaagtgcccaccatacatttttatatgaagcaagacgtgcaataacatactttaagtaccaaagattattttctaatcccatacgagcaaagccccaacggtcatagggactaaataaaattaaatcagcctctatgccaagtttgtctagtttatcaatgttattttccaaattttgaaaatactttggatttggtctcgtataatcaaaaccagtttcatgagcatcaaaaacccaatcatttgctccacgcttatatcttaaaaatccttcaaatggatatatttctggttcctcttcattatatgaatagctcttaggaaatacgagcattctaattttattgaaattattattctttaacgtttctagtgtttcttcttgaacctcttttggttgtacagtccatgcataagctgtagttccaaaaggaatataactactaccgtccgcataagcaaaatgagttttgcctgctaccctaaccggtccatgattatccttgcttgccttagttactgtaaaattatcatttttttcatctaattctggaacgttcgagtgtgtcgtaacagtatattccccctcaacttcgggcatgtagcgaattttatattttccatctccatcgtagaatccatcaactgtaatcgaatgattatttctatcaaaagttgcacttaattcaacatctcgaaatggatttccatcagtcggtccatccaatgttaattcatatcttttccacttttctacttctttcatttttattctccttcttatttaacagcctttgccgaagtttttttagtgtttcttgaaaccgcaagtactacaaataccaaggcaattactcctaaaatacctgcgctaattctcatttgatcaaccgcagtagacaacccagtcattccactcaataaagctattacatatggtgatgcaaatgcacctaaattgttacaaatctgagcaattgaaataattaagttactaatggaactgtctacttcacttaaaatactgtcgtaaacatacggaataattaagcttgaaatcatcatcaacaataaaccaataaagaaaatagtcatattaggggcttgtgaacacacaataaatccaactgtacctaaagaaattgcgactactggagtaaaattctttagtactttgaaaatacgagcgtatgccatagaaattagagctccaaccagacccgcaatagcaatttcggtagacaacatcccctgatttgccaaatgattttgttgaataaccagagctgatgctgttgcttcaaccataaatgccgaaaagtataaaaatagcattaagaacgcaacataaatacttgccggaatttttgcatgcttagatctctgtttctgttctttagtagatgatttttcaagagtagtttctttttccatctttggggtgtaacccatcatgaataaaatcaaaaatggaataataaataggaagtaaagaaaagttgcttgccacttaattcccaacaaaaggccagctacaaaagtcattgaactgtttcctaaagttcccatagcaccttgaatgccaattaaagttttttgttcttctccactaaaacagtctccaattaacgaaaccgctagtgatgtaaataaaccaatgccagcaccaaccagtaatctactagcaacaataattgcaaaattactaataaaaaacggtattaaaccaccaactattgtcgtaatcatcccaataataactgtattttcttttaccaacccatttaattactgcattactaaataaaatgaaaagcataatagtaaaagatggtaaagtgaagagagcttgtactgaagttaaagattgattcggaaaggacttagcaatcaaaggaatagctgctagattggagccagctacctgcaagaaaagtgatattccaagaattccgacttttaatttccaattatgtttattatcttgctttattttttcaacattcattgtttttcctccttattttttacttgtttttctcacatctctataatattatgtaaccggttacattacaataagcaattacttaactagcactaaactaatatttattattacttgcgctataatagctgctgtaacccagtattttcaaaataaggatttaaaaatatgaccattagagatattgctaaattagctaacgtatctgtcgctaccgtatctcgaatcatcaataattcaggaaaagtaagcgataagacacgattaaaggtaaacaagataattgaagagacaaactatcatcctaatcaagtagctagaactttatatcaaaagcgttcaaaaatgattggaattattattccttttgctgaaaacatcttctacagtcgaattattaatggaattcaatctgttttgcagccagcaggctacacatgtttgatatctttcagcgtaggttcaaacaataaaaagtatcaagcggccatcaataatttccttcaaaataatattgacggtatcatttcttctgcctttgaaatgaatgagaatatttgtcgtattccgcttgtgatgtatgatagtgcaaacatttctgacgatattattcgtatagcttccgataatgctaaaggtgggaaggaaagcgtgaagttaatctctactgccaaaagagctgtcttaattcaacatcttcctttaagcttgccaactgttaaagaaagagtcacaagtattattaatgaattaaaaaagaggcacttgacctatactttacaagaaattagtgaacacgacacttacaaattagtcgctgaaaaagctcttcataatattcagacttacgatgctatcattacaattaacgatatctatgcagcccatattttaaaattagctagaaaaatgaatctaagagtaccagctgactttcaattagttggctatgataatactgaaatgtctgagcttacttcacctactctttcaacgattgaccaacaacctgaattaattggcaaaactgctgctaaaagattgcttgcattgattgatggtaaaagttctactgaaaatagtgtgatagatattaaaactgtaaaaagagagtcaacaaaataagacttggcaaactgccaagtcttattacagatgatattgttttaatagttttcgtgaactcttatgcttgagtagcattatctggaatttctacttcttgatcaacggttgccattaaaatttgatcttcaaatcttactgaatctccatttttcttttcaataataatatcatcaaaattattagcattcgttacaataattggaactactgtgtcatatccagctgccttaattttatctacatcgaatgtctcaagtaagtcaccttgtttaactttttgacctacttcaacttttacctcgaaatattttcctttcaaatttaccgtattaatacctaaatgaatcaacaattcaactccattgtctgactttaatccaatagcatgtttagttggaaaaacagaaactacttcaccatcaaatggcgcatgaatttcatcattatttggttgaacagcaattcctttaccaatagtaccagccgaaaaaactgggtcatcgacattttttaattcaagtgcagtaccctgaactggggatgcaattccttgatctttgaattcaactcttttaactttaaaatctttctttgaagtagtagagacaattttatcgccccaaattagagtactgataaaagcaattccaaaagcgacaagtaaagatagacaaaatcccataaagctaccattaattccagctttttgatcaataaacattggaattccaaaaataccaccactagcaaagcctccaaacatttttgcatttgaaaaagcagcgattgctccaccaaatgctgatccgattgatccaagaataaaggattttttatgtggtaatgtaactccgtaaattattggttctgttactcccaaaaaaccagaaataacggctggccaaccaatttccttaaatttagaatctttagcctttagaactaaagccaatgcagccccagtttgtccaaaaactgtacaatataacatcgcatcaataggatcaaaaccacgagttgctatattgtttaaaaaaataggtataaaggcccaatgtagtcctagtaacactactgcttgccaaataccagctaaaataaacccagctacaactcttgcatgagcataaatccaaagaatactatatgtcaattcttcactagcccaagaagttgctggtcctacgactaagaaagttaaaggaacagcaatcattaaagttattaaaggcgtgaagataagctttaatgatgaaggtagatagttgtttaaaaacttatacagaattgatgctagccataccgcaataattgctggaattagcgtttgggtataattcatcaaaataacaggaatattaaagaattgaatgctttgcttcatctgatatgcctggactaaagatggatagcagagtgctgcccctataattgctccaacatattcatttattttaaatgttctagcagttgaaaagcctatcatcacgggtaaaaagtaaaataatgcatcccctgcagcataaagaattaaatatgtgccactctttgtatttaatacatgtaaaacaaccaagagcgttaaaaatccttttaatacacctgcagctgctaagactcctaaaaatggtgtaaaaatagttgttaataattttataaagcgattaactatatttttatctttatttgtattttctttatgatcctgactcaatcctaaaagtggaattacttgatcataaacatctgctacgttgtttccaataataacttgatattgaccacctgcatgagcaacgcccattactccttttaattgcttaattgcattatcatcagctttgctttcatcttttaatttaaaacgtagtctagtcgcacaatgaactaaactaattacattatctttaccaccaactagcttgactatttcttcagctagttttttatctttttcatctactttagacattttcttttctcctccacttatatttttctgctttaataagtgaaccaatgcatcataataaagctctacatcttgacctaaaaggatttgtaactgtccatcttcaaactcactttctgaaattgctggaatcaactttagttttggatagtttactttctttgaatcttttaaatagaaccttagccttgaaatacagttgaatacttcattaatattttctgctccaccaactgcaaccaaaattttttccgctacttctttataactgttattcatttacattacctatctgcaaccgcaatatgatgaatatggatcgttaagtacataatttcatcttgcggtactttataatcaaacttttgcatcacaattcctgcgattctttgtgaaattaaatattccttatgatagcggtgaacaaccatgctataaagttctttatcaacactagattcttggatttgcttttttgaaattctctgagcaaaaaattttagatgagttactaaccgataataagcaactgattttgaactaatttctatatttaacatttcactaataatatctaaaagcctattaattaattcaattgttccggctgtatgttcaagtgagtttccttcttcagcagtaattaaatgcattgcaatattagttgcctcatcttctggaaattttaaattttcacttttttctaaataataaaggacccgctttcctaattgaaactcatccggatatgtttgcatcgtttcaattgttaaacgattctgaatcggcattcccttctttatcctttcaactgcaaactgcaaatggtctggcaatgataaataaatatcgtcgcttaactttttacctgaacttgcaattgcttctgaaataatttgatcagataattcaatatattttggatcaatgctagctagcatttcactcattgagttagtatctttttcattttttggataaaatactttttcaactctctcttcaccaataacttcacctgcctttttatgaaaggcaattccatttcctaaagctactaatgtttgcttatgcttatctgtagcaacaacagcgttattgttaagaactcttttaattagaaacatataatttacctttcaataaaaaatggcaagactcaataaacctaacttaaaataatttagatttatttggtcttgccaacttaatgtaacaatccgatttcttattcagttataagcatagcatttaatgtaaacgattgcaataagtgctacattagtttagcttagtttagttgcttatctataattatgagttcatcttctagcactggtagcattttaaggacattattttctacttgaccttctaaaatacttctattatttaaatcaataactttacaattatttatatgtaaatctaatttattaaaatctaaatttccagctgttggtaaataaattaagatataattctcactttccgcgcctctaattgctttacttacatcaatattaagcggttttaaaccattaggagcaaatttagttaaaatggctttcagaaatcctaaatccttagcaccacgaaaagttaaacaggtcctccagtcgtatggtacaagttgaacgttaaaatttttctctaacttctgctcaggatgactaatatctttccaaggccatattccaaaactaccataacctaggcctgcatcagctcccgataaaactgctcgccaagcagcctttcgtacatcgaatgcattatagcgtttaggttctggcgaatgcatttgggtcaagccttcataacaaagttcggtatcaataatcggtccctgataattttgtttttcacgtaaagctaatggaatagtataggcagttttttgaccgctataaccatgaccagattgataactataaaaactaacttgcttaacaaattcttctggcaaatcatgactctctccattaatgtgaaaagtgtatatgccagctggatctacacttttggcactctctagcacttcttgataatacttaattgccgtttggcgattttgtctttcattattagtgaatcccacatccccacttacaaaccaaattggattaaatcttttaaatttattaactacgtaagtaacataaggtttaatgcaatcaaatggcattaaattattttgagcaaggtgaagattatcaatccaattatctggaatgaaattgctccagagtaaaaccagtgctggaaccatgttgcgctttttcatctcttccagcattttaactgcattatcaaaatactcctcgtttatcttagtaaaatcatattcatatgatccatccgggtgctctacgactgtgaatggttctcgtccttttaatggtttactagaatcccattggcgtaatatattaatttgaatagcattaaatccttcagattttctcatatcaagataatatcgccaatctggcattgtaatactagtaaaggctccccaacaagtatcagctaaataaaatagtttttctccatttttatacaaatatttaccttttgttgataacattcttttacattcctctttaatacttagcttatttgtgtttctgctcatcatccaaaatactatctaaatcgccgtaccaataagctgcaaccttatccttaattggatcataataatctggacttacattaatgtacttacatgcttctgctaaaataggtacaacatcagctcgtacaccagccatatgatggatatatggtccataaacatattttgcttcaaatctattcaaatccttaaattggaaccaggcataggtcccttgttcatatggtccatcacaagttttagcattaccaattaacattgaatacttaccgtgatcaccatcaaatcgcactaaggtataggttccatctttagcttcaaaagcagctgagccaggatagtcaaaaacaaaatgtgaaggtggtaaaattggccgattttttgctgtttgaaaggcgaatgtacctaagtgctgtaataattcaccattctcattttcgggatggcgacagttaacatctgcaaatatggctcgttcatcacccaaagtagcactttctgctaataattcagaaatagcaccattaatatctgtctcacaagttacgggcatgccttcggtttgaagtagtgcttcagaagcataaggtaaaataccgatttccctttgcaactcagtccaacattgaattgtacctgcattgcaaccatattccttcatcttatcttgcatagcaagtttcaaagcagctactttggtgaaatcttcatctttaattttaatatcagcccaattacgataggtttcttttgtttcctcaattctagaatcctttttgtcaattaactcatacatataagaagttaactctcctaaaggaattggtgaaagttgaataccaaacttttctaataactctccttcattaacgatcactgaccaaaagtcaaagggacgagtaccaatttgtaaaattcttgtattcttaaaagttttaactacattacatactttgataaaatcaatcatccctctactaaaagcaggatcgtcaatatcgctatttttaatgtaggtaaacgggacattaaagtgacgtaaaacttttccaatcgcaaataatccacactgtgtatcccttctacgtgagccgtcgggagctggagcttcatcttttggaccccaaagtaataccgggacattaagtttagcagctaatcttgccacttcatactcagtaccaaaattctcattagcaatgaacaacccatcaatttttgctttcttgaatttctcagtaatcttttctaatccatcatcgtcgtacagaagtccgtcatcatttacttctttaatgtcaacataattgacacctagttcatctaatttttcacgtgttttatttgcaaattcaattgctgctgttgcagaaaaaatgtttcttcttgttggtgcaaagccaatcttaatttgttttaaactatcataattagtcatactcattacctctcaaatttatgtattcgcttacacaaattacaatagctagtatttcctaacacatcaatagttaatttacttaattaaacttaactagctattttaatgattctcttacaattagttttgtcgagataaagcttttctggctaagccaatgcgtattacttactttttcttctagttgattaattgcctgtctaacgatttgttcaatcggaacgtgaattgttgttaattccggattaatcattgtatcctcaaaaatatcatcaaaacccatgattgccaattggtcagggattttaataccaattttggttaattctttaactaaacgtagagccatataatcatcttcacaaaaaattgcatgcggatactttttattcgaatagaaaaatttaggtaatgttcccctcaattcaactggatttaaactaaagacaaagtctggcggaatttcaagatttttttcttttagagcagttctaaaaccctctcttctcttcaaaaaattagtaattatccgatttgatgcaacataaccaatctgtgtgtaacctttttctataataaactttccagcattatatcctccttgaaagttatcaattgaaacaaagtctgcatctacatcttcaaaataattatcaataaagatagcattcttaattttagaatctaagaatagaatttgttttttatttaaatctgttgctagaacaatcgccgccttacttttctttagagcagtactattttcgatgtcttgtttcaaatttcgaatatttaaagtaacaatttgaacttgtccaccagatccaccaacattttgagaaagattagatactaatgaatcaaaaaacggtaaacttgcataacttcgattcattaaccctgtagtagtcttaataattactaagctaatgctagttaattttctcacaccgccctttttatgctttcttagtggttcatagcccatttcttctattactttaaaaatatgcttcctcgttttttcacttactcctgcttttccatttagtgcaaaagagacagccgcttttgatacacctgctttttctgcaatatcactcatctttaatttcattttttatttctttcttaaataaatttactaatctaaactaaactaattaaataattaatctatgttaactataaacatgataccctcattttgtaagcatttacaagataataaacaaattgaggtgtttctaatggatagtttaagtttaaagaaaaaagccgttcaattaaggaaaagaacatggcaactaatctatcgtcatcataacggtcacacaggttcagacctatcatgtactgatattttagttgctctctattatggcgttctcaaccaaactcccgatacttttgaagacaaaaactctgatacctatattcaaagtaaaggacatgcagtagaaatttggtacgaaattcttgctgacaaaggatatattgatcaagaagatttagatagacggtactccacttttaatagtccctacattggtcatccaactactgatgtaaaaggaatggaatttcatacaggctctcttggtcatggacttggtttaggcgttggcgttgctttagctgcaaaaatggatcatttaaagaaacgtacttttgttttaatgggtgatggtgaacaagcagaaggatctgtttgggaagctgctatggcagcaagtaactacagcttggacaatttaactgcaattattgaccacaatgacttacaaattactggtacaacggactcagttatgcgttctaatccacttagtaataaatatgaagcatttggttgggatgcgattgaagtaaacggtaacaatattgatgctttagtagatgttttaaataagccaaataacaccggaaaaccaagagttattattgctaacacagttaaaggtaaaggaattaccgttgcagaaaatcgggcagattggcatcacaaaataccgactaaagaagagtatcaagaaggattacaagaattagatacacagctggagggacttaacaatgactaaagaagaaaaactatctgccaatacagttatcgctgatacactagacaaagcaactaaagttgatcctaatttgttagttgtaacctgtgactcacgtggctctgcagggttagttaattttactaatgctcatcccgatcgcactgttgaaatgggaattgctgaacaaaatgcagttacagttgctgcaggtatggctcatgccggaaagcatccctttgttttctcaccagcagctttcctagcaatgagatcaattgaacaagtcaaagtggatgttgcatttaaccaaactaatgttaaattaattggtatttctggtggcaactcctacacttggctcggaacaacacatcattctttaaatgatgtagctattactcgtgctattcctaatcttgaagtctatcaaccatgtgatcaatatcagactagagcacttttcaattatctgcttacctcacctcgtccagcttacgttcggatcggtaaaagaaaacttgataatgtttatcacgaagattttaagtttgaacctggaaaagcaaaaattattcgcaaaggaaaagatgtttgtctaatttctgttggtgaaatgctttatttcactctccaagctgctgaaaaattagcaaaaaatggtattgatgctgaagttgttgatttagcatcaattaaacctttggatgctgaaatgcttgataaactagcacaggaatttaatcagatagttactgttgaagaacatgatctaatcaatggaatcggtagtgctgtagcagttgaagtagctaaatttggacatgctaaattaacaattttaggatttcctgatgaaccagctattcaaggaacacaagatgaggtcttccactattatggcttggatagtgcaggtattgaaaaagcagttgaagacctcctcacgcattgaggcatttcttatgactgaaaaatatattttagcaattgatcaaagcacccaaggaactaaggtacttctaatcaatcatcagaatcaaattttcttcaaggcttccctttcccaccaacagctcattaatgaaaatggctgggtgagtcataatttaaatgaaataaaaaataatctaaaacagctatttaagcagattcttgaaaaagttgattctagacaacttgaagccgtcgctattaccaaccaacgtgaatcggcagctgcctggtctcgaagaactggtgaaccgctttgctatactattgtttggcaagataatcgctcagaacaattaatcaatcaaattacatatccagaattagctagaaaagtaaaaaacaaaactggtttagctctttctccatattttactggagccaaatggggttggatgcttttaaatgaacccagagtgattcaagcacatgctaacaatgacctctgcttaggaacaatagactcttggctagtttatcaactcactaatggcgaatcttttaagactgaagtttctaatgcttgtcgaactgagctaatgaatataaaaactggaacatgggatcaggatttaggtgaaatttttggtattgatctcaatgatcttcctaaaattgttgattcaaatgctaattttggtgaaactaatttatttggtctcattcctcataaaattcctattcttagcgttttaggtgattctcaagctgccttatttgctcatgggtgttttaatcctggtgactttaaagttacgtttggaactggttcttctgtgatgttaaatataggtaataatttaccaaaaaatattaataatcagcttaatacatctcttgcctggtcaattaatggtaaaaaatcttacgttcttgaaggaaatattaattatgcaggagcttgcgttacatggttaaaagacaagctacatttaattcacgatccgtctgatactactatgctggccctaaccgctaatccaaatgatcatactattttaattccggcttttgctggacttggcgctccttattggctccctaatatgaaagctgcatttgttaatatgacagctaccactggtaaaaaagaattagtacgtgccactctaaattcattagtttatcaaatcaatgatattctacaggcatttcatcacttttcttctcaagtgaacagtgaaattcatgctgatggtggaatgatacaaaataaatatttaatgcaatatttaagtaatatcactcaaaaaaatgtaaagattgctgaagtcgctgagttaagtgctctgggaactgcgatgaattcaatgcaacaatttgatgggatgcattattctaaaacttatattcctcgaatggacaaacatgcagcaaataagtattcaagtgaatggtcttcttggataaaaaaattatcataataaaaaacctagaactttcacataattgtgtcagtactaggttttttattattaccaaatagtaattctatcttcaggatctagccacattccatcttctggagttacattataagcttcgtaaaactcatcttgattttgaacaggaatattaactcttgttggttgcggtgcatgtacgtctgattgaacttctgctgtaattgattctggacgttgtttttgcatccagctcttcgcataagtttcaaagagatctttcatctccccgccttctgctttattagcagcaattgcacaagaaagaccacttaaatcggcaatgttttcagaaacaacttgcttaccatttaacttggctggtccatactgtaagccatcaaaaatatcagcaacggccttagtacgtttattaaactcagcaaagtctttcttagtccaccagttcttcatattacccttttcatcaaattgggccccattattatcaaaagcatgagaaacttcgtgaccaatagttgctccaattccaccatagttagctgcacgagattgttttgcatcataaaatggcgcttgcaaaattccagctgggaaagttaaatcattcttttgtgggtcatagcaagcattgtttagattaccgggcattgcccaaacgcttcgatcaggaacttgatttagcttttgcaagttgtctttaatcttttcttgattaataagagcttgattctcatatagactcttatttagatcaactactagtcggtcaaaaacggcctgattcttttctggataaccaattttgagttttaaagcttgcaatttaacaatagcttgtttcttagttgattcggaaagccagtcattatcttgaattctttcttcatagaccttcaacatattcttaatcatgctaattacatcatttttagcatcatcgccaaaataagctttaccgtaataaatcccaacaacttcatcaaaagccgcatttgctaaacgatatgcatgcttatcttgtgctggcatttcaggcaccccataaacagcttgtctaaatggaaaagctgcttctctaaagtcttgagataagtaattagctcccccattaataaacttaacaatcatccagctcttgatttcgtcaaattcactattatttaaaaattcattgatatgatcaaaataacgtggctctgcttcaattacttgatcaggtaattcaggtaaaagctgttttaagaaagcattgatgtcgaaattttcaaatttagcttcaaaatctgccaatttaactggattatagacagctgcatagtcagcccattcttcagtcgactttaaaactttggcaagttttttatcaaattcaatacccttacttgcccaagtctttgcttgttcttcctctactccagccattacaagtaacttaactgtttgcttttccaaagtagaaagcaatttttcagcatcatcactttgatatgcagtagtatctggcaaaaatgtacctggtccttctgcatataaggcattatgatcagtatccttcatatcttccattacaaaaatattgaatggtaagtcatatccttttgcaaacaagtcagcagcttgtttattaaattcttcaaagctatttaatgatgttaatttttctaaatcagctttgattggctctgcctgttctttatttcttttatcaaaatcaattgctaatttataaagattaattgcttttgcaaaatttggtatagtaggaatctcctttttcccgtcagcaaatttggcaaaatccttcatcaattgatcttcgattcgcatatctaaaatcaagttaattccggttgaagttctgtcagctggaatttttgcttttgaaagccattctgagttaacggctaagtaaagattatcttggggtctagtattaatatcaggcttagttaggtcacctgcacccccgcgaatattaaagtattttctcatctaattaccttccattgaaattataagattaattaaatgatatcatgattaaattaattttaaaatgtcattttttagaaactagaataatactttaaactttactatttggttcgatcttaaccttaaaatctttacgtgggattgcattatttttcacgtacggtttcttttcgtattcttatttcacgacccattttgttagacttgtaacttatgagtgcaagtacttgcttccctctttaatcgaaagcgcggccatgtcggaataatgatcattaataaatttttttacccaggcccggttagttttagagtaatcacgtaagacccaaccaattgccttattgatgaaaaattctgaactattcagattattttctaaaattttctctaacaattcagtgttcatcttattttttcgtaagagctgatgttcaattgccactcttcttacccaaaaatcattatcttttgaccaagcaagcatcaggtcatctactcttccatcccttaacccaatctttccaattggctttatcaaactatcaattgtatcccaccactgcttagactttacataataaaaaatatggtcaaggtcttcaaacgttagaaatctttctaatgaaattaaataatcacaaacgaaatattgtgcttctcgatgtgtatcggaccatgcttgatcaagaaaattccaatcaatttttttatttttcttttctactttgattaggtcatggtaacttttccgtctttcaggcgatttcaaaccataaaactcaaatttattccgtagatattttttcatttgtgtggctaactcgggatcactattttcaactaacttttgttttagttgttgatacttatctaattctttcacttcagtttccttacttgttaaaatacatatagtaatactagagggagaataatcatgaaaattttaattgttatcgatgattatttcaataaaagtaatgggatgtcaatctcaacgcagcgctttgttcacgaatttaaaaaaatgggtcaagatgtccgtatcctttcttccattgcaggcggagaaccagattactctcttccaataatgaccatcccaatttttaaaaatattattgctaaagaaggatttcattttgctaaacctagaaaagaaataatcaaagacgctattagatgggcagatttagtccacttagaggaccctttcccggtttgctggagcgcagctaaaattgccaaacagatgagaaagccaattacaggtacttttcatctttatcctgaaaatctaactgcttcggttccagttttagaccatgccagcatcaactctgcttttatgagattatttcgtgatactacttttaattactgtagctatttacaatgtccaacttcgaaagtcgaacagcgtttaaaaaaatataacttcaaatccaagttaatagttatctcgaatgggattagtgattattatttacaaaataatcagaaaacaacaacaactgatccctttacaatactttcaatcggccgtttttcaaatgaaaaggatcaaaagaccttaattaaagctatcggacgtagtaaatacaaagatagaatcaaattaattttagctgggaaaggacccttaaagaatgaatatatctccctttgccaaagactaaagatcaatgctcagtttggcttttattctagaaatgacttaaaacagatcatggatcaatccaatattgttgttcattgtgctaacgtggaagttgaagggatggcttgcatggaagcttttgcgactgggtgtgtacccataattgcccaaagtcctctctcttctaccagttcatatgctttaagtcctaacaatctttttcccgctggaagaagcgaaattttaactcaaagaattgattactggattaatcatcccaaagatttaaaagtcatgagcacaaattaccaaaattatgctaaatctcttacagttgaattttctgctaaaaaggtcctaacaatgatgaaaaatgctcaaaaaaattatatttcaaactaatattcaaacataaaaatatgtgttattcttatgttaagtctttcacaaaaaggaggaaccttttttaatgtccattaagaagttagaaaatagcagcgatcatgcaatggtagctgaagaagttaaaattttgaccaacttacttaacgagagtatacgtcaattaagtggggatgtgatttttaataaaattcaagatttaattaaaatctccgcccaaaaagactacgatgctcttgaagagcaaattgctagccttactaatcaagaaatgattgtcgttgcacgttattttgcaactttacctttattagttaatatttctgaagatgtagagttagctagtgaagttaacctactcaataatacggatcaagactatcttggtaaacttgaagatacgattgacttagtttctcaaaaagaaaatgcaagtgaaattcttaagcatgttaatgtagttcccgttttaactgctcaccctactcaagttcaaagaaaaactgtccttgaactaactgaccaaatccatggtttattacgtagttatcgtgaagttaaaaacggaactattaaccaagctgaatggactgaaaaactccgcgcttacattgagattttaatgcaaaccgatattattcgtagccacaaactacaggtttctaatgaaattacaaacgttttagcatactatcctaaggctttgattccagctatcactaaatttacagctcgctatcaagaattagctaaaaaacataatttaaatctatctggtgccaccccaattaccatgggaatgtggatcggaggcgatcgtgatggaaatccatatgttactgccgaaacattaaagttgagtgccactttgcaaagccaagtaatctttgaatactatattaaacagctaaacaagctctaccgcacgatttcaatgtctacttcttatatgaagccttcatccgctgttgaaaaattatcagatctctcaaatgatgattcaccatttagaacgaatgaaccatatcgtcgtgctttctactatattgagagccgtttacttcatactgaatatactcttttaggcacagctgataaaaatagttttgttaaaaaacgcgatttggaaaacttagacaaaattcctgtttacaagaatccacaagattttaaagctgatttaattacaattaaagaatcgctcgaagaagatcatgaccaagctgtagttagaagtttctttactgagctattagaagcaattgatatctttggtttccatttggcaacaattgatatgcgtcaagattctagtgtaaacgaagcttgtgttgctgaattactcaagagtgccggaatttgtgatgattatagtgacttaccagaaaaagataaggttaaagttttacttaatgagttaaacaatgatccacgtaatcttcacgctaacaacaagccaaaatctgaactgctccaaaaggaattaaatatctacaagactgctcgtcaactcaaggattgtattggtgaagatgtaattaaacaacacattatttctcatactgaaagtgtctctgatcttcttgaacaagcaatcatgcttaaagaatatgatcttttaaataatcaaggagctcgcatttaagttgtgccattatttgaaacagttgaagacttagaaaactctcgtgaaattatgaaagaatttctaaatcttgacattgttaaaaagtggcttgcttctcaaaataattaccaagaaattatgctgggctactctgactcaaataaagatggtggctacttagcttcttgctggaatctttataaggctcagaaagacttaactgcaatgggcaagaaattgggtgttaatattaccttcatgcacggccgtgggggaactgttggacgtggtggtggtccttcttatgaagccattactgctcaaccttttggctcaattaatgaccgtattcgaatgactgaacaaggtgaaatcattcaaaacaagtatggtaatcaagatactgcttactacaatttggaaatgctggcctcagctactatcgaccgtattgtttctaaacaaattgtaagtgaagatgatattggtggattccgttcctcaatggatgaaattgttttagacagtaataaagtttaccgtaagcttgtttttgaaacaccagcttttcttgactacttcttgcaagctacaccaattaagcaaatttccaacttaaatattggttctcgtccagcagcaagaaagaagattactgatttttcaggcttaagagctattccttgggtattctcatggtcacaaagtcgaattatgttccctggctggtatggtgttggttctgccttcaagcacttcattgatgccaatcctaataacctccacaccttacaaaagatgtatcaaggttggcctttcttccactcccttctctccaatgttgatatggttctttccaaatctaacatggatattgccaaacaatatgcggacctatgtgaagatgaagatactaaaaaagtctttgatactatctatcaagaatggaaacttactaaagaagtaatccttcaaattgaaggtaacaaagaattacttgcagataacccaagtttaaagatgagcttaaattaccggatgccatacttcaatattcttaactacattcaaattgaaatgattaaacgagaccgcgtcgatgagattgccggcgtttatgaaagtattttaccgattaccattaatggggtaacctctggcttacgtaattcgggatagttttaatttttaaggacaaaatatgaaaaaggcactattaattattgactacactaatgacttcattgcagacaatggttctcttacctgtggaaagccagctcaagctttagaagattatttaatcgaattagcaaataaattttatgataatggagactatgtaatttttccaactgatggacataccggtgatacatttagtccagaatataagctctttccaccacataatattgttggtacaccagggcaagagttatacggtaagttaaaagaatggtatgaagctcataagtctagtgaccgagtatataaatttaacaaaaatcgctactcttctttccaaaatactaatcttgataattacttacgcgaacgtaaaattaacgacttatggttaactggcgtatgtacagacatttgtgttcttcatacagcaatgactgcctataatttaaactatgatttaactattccaagtaagggtgttactacctttactgaacatggtcaagaatgggctttagatcattttaaaaatgccttaggcgcaaaagtaatagaataatagaacaaaaaactgtatcatctgatttttcagaatgatacagtttttttctactttaattttattaactcgatactatcaataccatcgatttctttaacattaactgccacttgttcgctcaaggctgttggaatattctttccaacaaaatctgccttaattggtaattcccgatgtcctcgatctaccaaaaccgcaactgcaattgactttgggcgtccagttgcaatcaaagcatccatcgcagcccgaatagttcttccggtataaaggacatcgtctactaatacaacatgtttattagtaatatttaaattttctggttctaaatttgaaatcttttcttgattaatatcaactctacgatcatctcgataagaggttatatctagttcccctactggaataatcttcttttcaatttcttcaagtcgatccccaattctacgtgctaaatagaccccacgagttttaattccaactaaaaccagctcatctacgcccttatacctttcaataatttcatatgtaatcctaacaatagctcgttgcattgcaggcttatcccaaatttcttttaccattgtctcttttcctcaatcagggattatttctactattttaaagcgtctgttgcaaatgacctattttcaagagatgttaaaagtgcgtcagctgtgtccagtgctgtcaataatgggacattctgttgtatagccatttgtctgataataaagccgtcagaattcttctcaatatcatgccccatcgtattaatcactaagtcaattcttccctctcttaattcatttaagatattgtcatctgcattttcgctttcatgaactttagttacaagatcaacatgtaacccattattctttaagaagtctgctgtacccttagtagcaaaaattcgataaccaattcttgcaaatctctttgcaattgggagaatcttttctttatccttgtcttcaattgttaacaaaacatttccattttcaggtagttgcatcttagctccggcaaaagctttataaagagctttcgcaaaagtatggtcgcttcccattacttcacctgttgatttcatttctggcccaagatatgagtctacgtcagctaacttgctaaaactaaaaacgggagccttaacactaatcatttctggttcaggtgctagaccatcactgtagccctgctgcgctaggctttcgcccataattacccgagtcgcaacttgtgccatttcaattccagttatcttacttaaaaatggaactgttctacttgcacgaggatttacttcaattacataaacttcaccatttctcacaataaattgaatgttcataattcccacacaattcaaagtaagagcaagcttacgcgtaacatccataatcttatctttaacttcatccgtaaagttttgcggtgggtaaacggccattgaatcgccagagtgaacaccagcatgttcaatgtgttccataattccgggtagtaaaacatcctgcccatcacaaattgcatcgacatcacactcacgaccgtctaaatagtcatctactaaaattggatgatcagctgcaatgtctacgtggtcatgcaagtattcttcaagctcactcttgttgtaaacaatttccattgcctttccacccagcacataacttggacgaactaagaccggataccctagctcttcagccgctttaataactccttcatgtgttgttgcagttaagccctttggttgatttaatttaagtttcttaattatttgatcaaatagttcacgatcctctgcacggttaagatctttaacactggttcccaagattttaatcccgtgatctttcaacccagcagccaaattaattgaagtctgtcctccaaactggacaattacaccttcgggcttttccaaatcacaaacattcaatacatcttctaaggttaatggttcaaaatataatttatcagaaattgaaaagtccgttgaaacagtttctgggttcgaattaataacgattgcttcatagcccatcttttgaagtgcttttacacagtgaacagttgcataatcaaactcgacaccctgtccgattctaattggaccagaaccaataacaattactgattttttaccagacttatgtgattcattttcaccatcataagttgagtaaaagtatggcgtctttgattcaaactctgctgcgcaagtatcaaccatcttgtagactggaatgatcccattctttttacgcaagtctctaacctgatcaatactttcattccataaagtagcaatggttgcatcactaaaaccatatttcttagctaaacgtaaagtttcaagattatctttattttcttggatatttttctccatctctaccatgtgactaacaatatctaagaaataaaagttgatcttggttaattcatgaacatcttcaagactataacctctgcgaaaggcttctgccaaataaaagagccgatcatcttgtgctttaactagcttttgttctatctcttcatcacttgcatgatgagctgtttcagaatagagatctttttcgtcaatttcaagagaccttaccgctttttgcattgcctcttcagctgttcggccaattgccattacttcacccgtagccttcatttgggtacttaaagtgcggtcggccttagaaaacttatcaaatggccagcgaggaattttgcagacgacataatctaaagctggttcaaattcagcatatgttgttctagttaccggatttttaatttcatctaatgtcataccaattgcaatttttgcggccatttttgcaataggataaccggttgcttttgaagccaatgcacttgatcgtgaaactcgaggattcacttcaatgacatcatagtcaaagctattaggatctaaggctagctgaacattacaacctccctcaattttaagagccctaattaaacgtaaagagcaatcacgaagcatttggtattctttatcactcaaggtctgactaggtgaaaaaacaatcgaatccccagtgtgaattccaactggatcaaaattctccatgcaacacacaatcattgcattatcatcatgatcacgcattacttcaaattcaatttctttatagcccgcaatcgatttctcaattaaacattcagtaacaggtgacagttctaatccgttcttggcaatttttgctaactcttcatgattattacaaataccaccaccagttccgcccatagtaaaggctggacgaacgataattggatagccaattctatcgccaaactctaaagcttcttcaacagtattaacagttgttgatggtggaacgggctcacccaattctttacataactctttaaatttctctctatcttctgcttgttcaatcgaagaaagtcttgttcctaataattcaatatttaactcatccaaaattcctgttttagctaatgaaagggccatatttaatccaacttgcccaccaagcgttggtaaaattgcatcaggatactcttgtctaatgattcttgagattgattccacagttaggggttcaatataaaccttgtctgcaatggtagtgtcagtcatgattgtagctgggtttgaattaactaatactacctcatagccctcttcgcgaagagctaagcaagcctgtgttcctgaataatcaaattctgcagcttgaccaataataattggaccagaaccaattaccataatcttatgaatatctgttctcttaggcatgacgctcttcttcctttctttggtcaatcattgacataaaatcatcaaataatgagtcttcatcatgagggcctggagttgcatcggggtgaaattggactgaaaaggcaggatattttttatgacgtaatccttcaaccgtgccatcatttacttcaacatgagtaatcatcaaattttctttatcaatagatttaggatctaccgcataaccatgattttgagaagtaaaaccaatattaccagtggcaatttctcttacaggatgattaaagccgcggtgtccaaatttcattttgtaggtactagccccatttgcgagtgcaaagacttgatggcccatacaaattccaaatagcggaacatgtttttcaacttcttggaccatttttgcagccataagcatttcttctggatttccaggtccatttgataaaagcacaccatctggattaagatttaaaatttcttcggctgttgcagtgtaaggtaagacaatacagttacagtctctctccgctaattctcgtaaaatactatgcttaataccaaagtcgataacaactatatttctttttgagccaggtactggataagagttcttcgttgaaacacggctgattacaccgtgggtaatgtttttttgctttaattcttgagcaatacttactgcattttcctttgaatcagtaattcttccttttagggtaccgtgaattcttaatttcttaaccaattcacgggtatcaactccctgcaagccagggatgttcaattgttttaaaaattctggcaaggttgtttgcatacgccaattgtatgggtgacgtgctacttggtggcaaataacgcccttaatttgtggctcaagtgattcataatcagccaaagtaatcccataatttccaattaaaggattagtaaaaaccaaaatctgatcggcataactttgatccgtaattgcttcttgatagcccgtcatccctgttgtaaaaacaacctcaccactactttcacaatcagctccaaagccttcgccttcataaatactaccatcttctaaaattaaatagcgtttcattttgttcccctttgatatacaactttaccatcaacaaacgtcatcactgtctcgccatataccttatgaccagtaaatggtgtatttactcccttagacttaaaatcatcttctttaatttctctttgatgctcaatatcaaaaatcgcaatatcggcattctcacccggtgcaagaagacctgcattttctatgccaaatactgtagctggcttatcagtaagaagagatagtaattgttcaagcgtgaaaactttttcttcctttacaaatctagtataaagggtgctaaatgctgtctcacttcccgtaattccaaaagcggctcctcgcataccaccctgtttttccgctttagcatggggagcatgatcagtcgcaattaaatcaattgttccatctagcaagccaactaacaaagctacctgatcttctttacttcttagtggtggattcatcttgaagtaagcattatcttcaggaatatcactatctgttaataaaatatgatgcggtgcaacctcacacgttaccttaatacctcgtgcttttgctaaacgaactaattctacactggtttttgtcgaaacatgacaaatatggtaatggactcctgttttttgtgctaaaaggagatcacgagcaatttgcgtagtctcagcaagttctgtaactggtggtaagtctaatttttcagctgctattccttcattaacaattcctttattaaaaagtgaatcatcttgggcatgggctgcaataattaagttgttttctttagccttttgcatggctagatacattgtctgcgcactttgaactccatgtccgtcattacttaatgcaaatgcgcctgctttcttaagtgccgcataatcaggaataatatcagttgtttcatcattagtaacaggaccatactggagaatatgaactaacccctttttttgattttctctaaccattttatccattaattcagctgtattaggaacaggagtgacattaggcatagcaccaacggttgtaaaacccccacgtgctgccgcttggctaccagttttgatatcctccttatacgtttgaccaggatcacgataatgcacatgaacatctactaagccggggctaactatcattccgctagcatcaattatttcttccccttctaggtcagttccaatagccttaattttttgaccatcgattaaaacatcggctttgattaggtggccgttttggtacacagttccatttttaattacagtagtcattacttgagtcctcctaattttcttcctcgtaagactgcttcaatcattgccattctcataaatacaccattttgcatttgacgagtaaacatacacttgtcgctttccaccaaatttgcacttaattcaacatcgtggttaattgggcccgggtgcataataattgcatttggctttaattcttgatagcgttggttattaattccgtatttttcatgatatgcttttgcatcaaaattcttttcattaggatcatcactatgtctttcatgttgaactcttaatagcatcatcacatccatctcggaaatcaacttatctagttcttcatattttccatatttatcaaattccttggagtaccaatattcaggtcctgaaaagtaaacttcagctcctaaccgatggagtaattccatattacttttagcaactcgtgaattagtaatatcgccaacaatagctacctttagacctttaaattgcttaaaatgttcatgaattgtcatcatgtctaacaaacattgacttggatgttgaccactgccatctccggcattaattattccaatatctaaatgttgatgattttgagggcggattaaattttgatagtattcattttgtgaatgacgaattacttcaatattcactcccacagcttccataatcagggatgtatcatataatgtttctcccttattaactgaagaatgagcaggatcaaatgggattacggttaaacctaattttctttcagccatttcaaaactagtatgcgttctacttgaatcttcaaaaaacatattagtaatatagatgggctctgttagattaggcgtagctccgccatttttaaaatattctgctcgattaattaaagcttcaacttcttcaacactcagattttctacactaacaaaatgtggtaaactaacaagatttaaattttccattttttattctttctaaagcaaaaaggcctgaagcatttaattgctccaggcctatttttcatattcttgcatacgaaaaatatagcaacccttctggccctctctggagtcaattaaatggttgactattaaattaatattttttaattattttgatagagatttcagttcaactgaatccttaccatctttttctaccatgttaacagcaacttgttcgttagctgcagttgggatattcttaccgacaaagtcagctctaattggtaattcacggtgaccgcgatctaccaaaactgcaactttaattgaactagggcgtccatcatccatcaaagcatccatcgctgctctaattgttcgcccagtatagattacatcgtcaattaaaattactttcttatcggtaatatcaacgtcaatttggttagaattgactactggatcttgttttaatgaagcatcatgacgatcatcacgataaagagtaatatctagctcatcgattggcacatcaacattttctaatttttgaattcgttcatgaattctcttggctaaataaactcctcttgtcttgattccaattaaaacaagattatcagtacccttattttgctcaataatttcataagtaattcgagttaatgcacgcttcattgcgagtgcatcccaaatttcctttgccatatttttcctcctgattttgcccataaaaaagctcctagttcttgagactaggagcttatagttaagtcatacttatttaagcctgccttgctagcctcacgggactaattttaaaggacatttattgttttaaaattactgtacttcatgatttttgtcaagccatttaattaaaattgactttattcaccaattgattaatatctgtaatccctaacttttctaattcctttggtaagtcatcagcaatatgctttgaagcgagactatccttaaaatgcgcagttccaacagcaactgcattagcaccagctagaataaattcaattacatctttagcggaactgattccacccatcccaataattggtaaagttgtactttctcgaacttggtgaaccattctaatagcaattggttttacggcttcaccagaaagaccaccaatattgtgccccaaaacaggctttctagtttcaacatcaatctccattcccaaaagagtattgatcaatgacaatccatctgcgccaccattttcagctgctttcgcaatctgcgtaatatcagtgacattaggagttaattttacataaattggaattttaacgagtgacttaatttttttagtcaattcttccactacatcaggatgaacgccaaagctcattccgccctgattcacattcggacaagaaacattaatctctaaggcattgactagtccagaatcagatagcttcttagctacttcaagatatcctgcttcgtcttctccaccaacgctagccataattggcaagttaggatattcactacgcaaaggagttaacttatctttgattaccgcatcaacgccgggattagttaatccaactgaattcaaaactccagtatttaaaacagctatttggggctgcggattacctgttgtactatgaggagttgttgtctttattaccattgctcccaaatcatttaaattaaatttcttggctgctggtacatcaccaaaaccaaaggtaccacttgctggcataattggattttttaaatctaatcctggtaattttacgtgtgtattaatcatattttcctccaaaatgaatgctctctgtcattcaattatttttcaagaattgattgtacacgcttttttatttttttcaaagttaaaaattttatttgtaattctttctcgaagatgctaaacttcattttgattaaactttaaacggtacagagagaccgcaagttagaattattggcttaaattatctgggaaagtctatacctagtgtctctctgcgcttggtatagatttttttatggaggaaaaatgagtagacctgttatcgttgccttagatttagacaatgaaaagaaattaaatgaactattaccgaaactaggtaaacctgaaaatgtttttattaagatcgggatggaactcttctttaacgaaggccctaaaatcgtaaaacaattatcagaacagggttatcaaatctttttagacttaaaaatgaacgatattcctaatacagtctataacggtgcaaaggcattagctcgtttgggtattacctacaccacggttcacgcacttggtggcagtcaaatgattaaggccgcaaaagatgggttaattgcgggaactccgattgataaaaatgttcctaaattactagctgtaactgaattaacttctatttcagacgaaattctacattatgagcaaaattgcaatttatcgatgaatgatcaagtattaagcttagctacaacagctaaaaaagcaggtgcagacggtgtgatttgttctccactcgaagttaaagacttacgtcaaaaagttggagaagactttttgtacgtaactcctggaattagaccagctggtaatgctaaagatgatcaatcacgcgtagccaccccacttcaagcaaaagaatggggttcaacagcgattgttgttggtcggccaattactttagccactgatccagaagccgcatatgaagcaattaaaaaggagttcaactaacatgcataaagatcaaattattagtcaattaatcaaagaaaaaattattactatttctcctgacaaacctttcacttatgcaagtggaatgctttcaccaatctataccgatcttcggttaactgtttcttacccagacctgcgtgatatgattgctagtgatctatccaacctaattgcggcagaatttcctcaagcaactattattggcggagttgcaactgctggtattcctcatgctgctttagttgccgaaaaattacatttaccaatgatttatgttcgtccaaaacctaaagatcacggtaaaggccgtcaaattgaaggtcgtttttcagaaaatgatcaaattgtcttaattgacgatctaattaccactggtggatcagttttaaacgcagttaaagctactgaaaaagatggcggaaaagtagctggggttgcttcaatcttcacttattatttgccagatgcaaaagaaaactttaaagaggcaaatgtaaaatatactccccttctttcttatcctgaattacttaaaaaagaaaatgaatctggtcatattaccagtgaccaatatgatattttaaaaacctggcatgaagatccatgggcttggggtaaaaaatttaacagttaaatctaaataagattatcatcatatagttaatttaaaaatagttaatttaaaaagagactgattttttattttcagtctctttatttatttccagctattttattaataaaattttctttaatttcaaactggctacaaatatttatcaatactgcaagttacttaatcgccttatttaccatgtggtagacttaaggagagtaagtgattttcttttttattagcaattcgttaataaaaaatacaacatttatctatataatgaaattacaattggcagaaaggacggatgaaatatggatacaaataatattttgtcttacataaaatggcgtggcgatatttccctttctgtacgaccctttgacgaagttgatgcattagtaattgccacgttttcttatattcatcttgacggaattgtccctgattctaataaagagatttcaataaaggaagccgctaagaaatattttaattcttcaaatcaacatctcgaccattataagtatcaagatttactaaaattaatggcaaattctgttcgttttggagatgcgaaattatcctactttgtagatgttcttactgatagaatacaattttctgcgatcaaaattagtctagataatgatactaattttatttcctttcgaggaacagatgacagcttagttggctggaaagaagattttgaaattagttttagaacaaccggtgcacaaaaatatgccctaaagtatctgacaaatattttaaagactaccaagcaagtctacagtttagctggtcactccaaaggcggtaatcttgctgaatacgcagcagttaacctacctgatgacttaaaaaatcaaatcaaaactatttacacttttgatagtccgggacttagtactcaagttgatggagttactgataaattaaaacgttatgtgcctgaatttagtatcattggccggctttttgagccagaaaacattaccccaacaattttagttagtgatcggccaaaactagctcaacatgatccaatgagctgggaagtatcgggttctcactttattactagagctcatcgcaatccaacttctaaaatatataatcaaatcataaatcaatggattggtgaagcaaatcttcaagaacgtgaagctctaacaaatgatctatttaatgcttttgcagctagtggagcaaccaaaattacagaacttaataaaaatggttttggtggttttggcgctattcttttctctcttactaattcatctagaagaacgcgatttgttctcggaagtttatgggaaaccatctggcgcagtatgaaagcaactcatctagagaaattatttataaatcccaattcaattattggatgggtattaattattcttggtattgtaaacctgatgattcctgattatgcctatcgagcatttggaggaatagttggcgtcttttgtattggatggagtggttatcatattgttacagctgctaactcccatttagtgcccaagtcaaagcaattctttattattacttatctcattgtttttggcttagctgttgcaattatttctaataaccgtttattggctttcttagctcactatgttctagggatcttcttgatcggttttgcatatgtcagattacgtaatgtaatcgttaaaaataagaaaaatggaattttcaaaaatattattgatatcatagaaagcttaattgcttttgctgctggcattattgtaattgtcaatcctaattatttcagtcgtcaagcagtcattattttgggcattttactgatcatttatggcctcttccagctaataatggagttatttaaacaaagaaaatcaaaaattccgcctaaacatcgttaacaaattaaataaggcttttggaacttaatccaaaagccttattatttgcttataaaattttttcaattgcctcggctacaccatcatgatcacaatcacttgttactctttgagctgcttctttcacagcaggcactgcattacccattgctacaccaacacctgcaagtttaatcatgcttagatcattttcttcgtctccaatagccatcaaattttcactacttaaattcaatttgtgacaaagaaattttaaagcatttcctttagaaacacctttaggatttgcttcataataaaagggtgctgttttagtaaaagtaattttatcatctagatgggcaaaaggcttatgatcagcaattttttgatctaacaaatctttctcatctacatacatgcacttaataattggaatatccttcatttcagctggtgtacggtacgaaatacctaaattaactaggttcgcttcatataaagtatagtcgccaatatctcgatctgcggtataaattctatctggtgctgatgcatggaagtgtaaacctaattttaaggaaattgtctctaaatctagataattgtcataggttaattttttctcaaataagacatttcccgccgttgtttctactactccgcctccaaaacaaacgacgtattgatcttcttgatcatttaaacctaactcagtcagaatcttttctactccgctcaatggtcgacctgtagcaataacaatttttatccctgcactttttgcttttaaaattgcatttcttacttttggagtcagttcttttttagaatttaataatgtaccatcaacatcaattgcgattatttttatatttttcatcttataatttgcctcaatattgctaatcctacaactcctaatccaatgcatcccacaacgcttaattgcaagcgccaagtaatcgttaagtaggcaataaattcacgtacaaaggcatttaaggtaaagtaccactttgtttttgcaccataaccaatacactgtaggcctaatctctttgctaaaactagggcacgatatacatggtaagaattagttacgatagcaaaacgagaatctggtttcatcaatttatgtgaaaaaatcaaattttctctagttgtctttgacttatcttcaacaataatatcttgcttcggaacacctttttcttcagcatattttgccattgccactgcttcaggaatttcttcacctggtccttgtccacctgacataatgatttttgagccaggattacgacgatatacctctattccgcgattgattcttgcagcaagaagcggtgttaccttttttcccattaaacctgctccaagtacaaccacgtagtccaacttcttagtcttaatattcactagattaatccaagaagttaaagtatacatcatcataataaaaattagataaattattacgaggttaataaacaaatatatgtaagttccaaaattattatgggttaattttccgactaatggaaagagaaataagtaagcaataattccgatgcccattgctaacgataagaaattagtccagcgattaccttcgcgaattaaaatcttaatcccatcgtaaataaacataatgatcaaagtcgcaataaaggccacaacggaaaacattattgccagtaaaattagcacaaaaataagcaaaataacttgatgagtaataggaaaaacttcagcagcaattagtaagctaactgccgtaaatagaccaaaagtaattattgtccatactaaagtcatccctgaccataagcttcgcctctcatgagttaaaacccagagaaatgttcctaatgccagtaaaaataaaactaatacaattgaaaatgataagaccacttatcatttcaccaccttattctagtgtaagtagctgtacttacttttttcttaattatacaaaaataattgtcttcatgtttttgattcagtataattaagaaaatatttttaggaggacaaagaaatggcagaacaaattttagtaacaactactgaaaatattccgggcagaaaatatgaaattatcggtgaagtttttggtgttacaactcaatccaaaaatgcaattcgagattttggtgctggcttaaaaagtattgtcggtggtgaaattaaggcttatacgtcaatgttaactgaatcaagagatcaatcaattgctcgtcttcgtcaaaatgcctccgaaatgggtgctaatgccgtagttatgatgcgttttgattcaggctcaattgctggcgatatgcaatctgtcgttgcttacggaaccgctgttaaatttattgattaatctaaaaaaactggcttctcagccagttttttattttcttaaaccttttggatagaagttctttaaaatttgatcatttccaatttttccaaaactgaaaatatggtcttgataagcaaccaaaacaaagccgcgcaaattactatctaccttaatcgtttctccatgtatatagcgctcataatctaccttatcttcaaaattaataagttgtttttgttctttttgtcctaatacctcagctagttgatgactcggctcaaagcgctttttcttaagtaaccctaattcaacaccattatttagaacatgtagttcagttagcatgtctgggtcaagagctggtacaaagacgtgaccattactttgcaaaacctcattttgccaattttctaaactagatggtagagcaaaattatctaatacttttgcaaccacactaatctcatctttatttaaacgtgtaattgtgctctttttctggcgtttgttctttctctttttagccttagttgaaatctcttgattctcttcaatatttttcagatgagcaacaaactgtccttcacccactccattttgaaaccagagtctaaccgtttcctttaattctggcatgttagactttgaccaatctggtctaccagccgacattccggaatagagcttaagaggttcgatttctaacggataattctcaactagccacgctactatttcttcatcttcttctggagaatatgtacaagtagaatagacgatctctccgcccggctttaacatcttcattgcttcactcagaatttctttttgtctagtttggcatgttaatacatagtcaggagaccaatattgtgtcgcagcaggatcttttctaaacatcccttctccagaacacggtgcatcaactaaaattttatcaaaaaagtgaggtaatttttttgataagcgatcggggctttcgttaatgactacaacatttgtagctccccatctttctagattttctcttaaatcttttgctctactttttgaaatttcattagctactaagagccccgtattatctagcaaactcgctaatgcagtggattttccccctggagcagcacataaatcaagtaccttatcgccaggttttacattaagagaaactgctggatacatggccgatggatcttgggagtaaacatagccgcctgtccactcactatcacgtcctgaaatttctccataatatccatctttagtaaattcaattggttctttaagactatattgaacatcttgataattattctttagtgggtttaagcgaaatccctttttacttggactattaattgcagtaaaaaatttactactttcttcttctcccaataagttcttatatttctcaacaaattcaattggcaatgacattatttttccttcttaatttttattaaaagcagcattaatacataagtaataatctgcattgcaaaaacgattaaaaataggacatataactgactgtgattagagtaaaaactccacgtttgtaaacccaaactagtcaaaataacaattattccattggctaaaaagaaacgtaaaccagaatcagccaataagtgcgcccagattttactagaaacatattttaagtttaccggattttcagctaggactgctgcaattgctgcaactatcagtgcaattacaacacagaaaattgcaccgattaattttttagttggactgatcccatgctgcctattgtaggttttactaaagtccttaatctgcatacttccccggagataatgttgtaaggcattcgcctcgtttttattcaacccatctactactaccttatagttggtaattgattcttttgcagttggttggttaattccagttgaaagataataaacagcctgtccattttgactctcattgtttttctttaattcaccaataattgtgacgtaatcattattttcttttagatagtgattattctgtaaggttacaactcgatctttagtatcggatgagataactgcaaaaggaattgtcccatcaaagtcatttttactaaagtacctagaacttcctttagcaagcggttgacttttcaaattatagttagcccaaattaaaacgcggtctgggatatagtccgattcaaagtgaatctgcaccttatcatgagagaaatttttattaacataagttaggaactgtttaatattgtgttttttcttaggattaaaaacataatatgtgcttgataaaccgttattacttaaaacttgatcagctctctgagactgctgccgtgacaaaattaagcccagtcctaagaaagctaaaaaagaaattattaaaagaataagtcgttttattttcattattttatctcaaacaccttttcattaatgaaatcaaagcttcgaaaactccgattaacctttttattagtcgtagtttttgcctcttgccaaaaagtagtagaattggttgctccaaatttttcaccaataaataataaaactggctggtaatcaagctgacgataaagattgagaatatttacgtcatcttccccaaaattgggcgcccaagagcaaataattagatcaacttcgggatgcttcttaatcgcacttagggcatccaaattttctgtttcaaaaatcggagattcacctgttgttgaacttttcgcccaagcaaaagaatcactagccgtcgcttttatgccaacctcacttaaggcttttgaccagtatgcatttcccgccataatttctaagcttgatttaacattatattcttgtttgattaacttagcagtttccaaatttggcaaagaccagattccgtattctcttgaaagaaagctacgaaaattattcagtaaattatttacttcttgggccttctcgctgcttgccgtattctctatcattatatctaagctatcgggtaaaaagccaagtgaattaggtgatttttgtaaaatttttcccttctctaggtgagtaattatattattaatggcaatcacttgctcatgaagtggtaaataattgagttctttgtctaatttgttaagtttattttgatatttcttcattttatatcttccttatgcaatgattttaccattcaaaagaaataaaaacaggtataataaaagtgatgcaaaaattaaggagcaaaaatatggcaaaacataaaactgaatcggctgaatcttttggtcactggctcctacaagtatttattttagcaattataattattggattatatttagttgtatttcgatttttacttgctaatgaaactatcagtggaccatcgatgcagccaacttttgaaaataatgaccgagttattgcagtacgacattctaaactttctcggggcgatattgtaatattaaaagccccagatgaaccaggtgccctatatattaaaagaattattggagtgcctggagacagcattaaatcaaaaaatgatgtaatgtatattaatgggaagccaattaaagaaccatatttgactgagtacaagaaaaagctttccaaaggtcagctttacactaacaattttagtttagaacaactttatcatgtaaaacgcgttcctaaaaattggtactttgtaatgggtgatcaccgcagtgtctctaaagattcccgaatgattggatttatcaagagacaagatattattggtgaggtaaaattacggtatttcccatttaatcaaataaattggtactaatatattttagaaagtgtgaagaagagaatgagtcctgaagaattatccgatgcaattattgaatttgaagttaagaataatgtcaatgacactgctcttgctttttcaagtcatctttccgttgaaaaactccatgcaatgaaaactggagaagctaaatataccgtagaagaagctgaacaagttttagattatattcaagctaactcttaatttaattattcaataatagacaaaaaggaataaggttttggtaaaaatgatatgaaccccgaaattcggacaagaatttcgaggtttttattatgtctaaattatctaagcaagacaaaatttacatctacaataattgggagcgttatcataaatcactatctcaactaggtagagaatatagagtaagacctgacaatttatattatttaatccgtctaatagaccttcacggcttaaaaatcttgaataaatcatattcttcttattcagtagaatttaagaaaactgccattaaaagaatattgattaacgatgaaccagccactcaggtttcattagatttagggctacgtagctcaggcatgatctttaattggcttcgcaaatataaagaagatgaggagaatgtcattaatcacaagaaaggcagaccatctcatgaaaagcaaagaccaacaaatccaagagcttcaaaaacaagtaaaagacttaaaacggcagaatctcaagcttactgtcgaaaacgaatttgtaaaaaattgagcgcctttgtttcccaaagagaaaaccaaaagcatcaatgatgacatcaaatttattaatcatactatcatggatggcaaaaatatcatcgacaattagattagcatcattacccaggatttccttagccttactttcacgtctaacgatgcctgtaatatcagtttgcggattttcctttgtcagccactctgccattccagatgcaccaataacttcaactttcatcttactaacctctctttcacttttgtctaaaatagaccaatacttatctcaagcgtagcacgattatgtgaaaaagcgttgtaagacgctaatcaatggtggagaggattttttcaataaaaagaaaaaggatctggccaatttcacctagatccccaagtgtagttatcttaattttcagatattaaaatatttaacagcttgtttactgatagaaattctagcttcaattattgcgtgtggatccttattaaaaattgatacaatttccttatcagttttaaagtaattaaagctagcaaagaaagcattccaatctctataaaagaggtttgtaaattgtttttgtaataataacattgctataaaatctggtaaaaactctttatagacttgctgtagatttaaacttaaagttttatctttaatgttcaattttactaaactatatttatcacataaatatgtaaaaatagactttattttcatagatttatatatagatgttctattttgatctaagaaagcgtgtccaatttcatgatacacaaaaaagaaaaaacttcttgatcaattaaattattactattttgtagcaaaactaatctatttggtacgataatagttttggtttttactacataaataggcattattactttagaactaaaagttgtcataaaatttatcttaaaattatattttttgccaaaagctgttttcaaatattcattagccatgaaccctattttcttcaaattatgagtttctattttagcactcagaggaacatactcgttatgaattaaccttacaaaattactttctataccttctttttgcgtaactagaatattttcccctaatctaattttccaggtgtcgctcattaatgatcccatcctttgttaaagtataaattttaatcttatacttcttaaccaaattaaaatctatattgtgtgcaacttctatcatcatgactggtaattgatagattaatgttctaatcttcgttgaattttctttatctagacttgaagtgatttcatcaagtaaaaatagattcttttttcttaataagcctcgtgcaatcactaatctttgagcttgtcctcctgacaaattagtcccattgctttcaacttcaaaattcaaaggttgtgcgcctaattctttccataagtgaacttctttaagcacttttatcaatcttttttctgagaaagattgatataaggacaagttctctgcaatagttcctttaaacagccatggtttttgcgaaattagaactgaatcagacaaagcaatcgaaccttgaccaaatttaacttgaccagaaattggagttaattgaccagaaattatattgagcaaagtagattttcctactccagaatctccggttattattaccttatctctatctttcatttgtaaattaacatgcttaaaaatcaactttttatctctagcaaatgatataccattcactgagagttgattttgtgaggtagttttcaccgctttatcagtatcatcttgaataattttaatattacgaatgtttttagtacttgtaatttgtgtttgataacttgaaaattcacgaattccaccaagaacatggtctgtggtcaaagacaaggtcacaattgtacctatttctacgccatccaaatgatatgccaccattaacagaccaactcccattggaataacgtcagcgataatagagcacatccaagcacagaattgaacggaaaattgaacacgatttaattgaaaatatctctcttcctcttcgcttaacgtgctaataaattttctaaagaaaagatttttgacgtcaaatttcctaatttcatttttcccttggaagatatctttcatgactgtaatcaacgatgaattgcactcactccatgaatccattttttgattcattctttttttaccaatttgattaggaaccatacttaataatgaaagaataatatagactaaccctaataataaattagtttttaaaacaacaattgtagttgaaataatagtcattaagcactgaatcaaattaaatagcggctgaaaatattgcttttgaatttgattggaaatactagcaaccttattgattacgtctgatgagcttacgtttaaatccttttgtttataaaaatctgaagtaaaaaaagtatactttaacttttcatttaaatattgaattgccttttgagtagttaacaaaaatagataggctgatacataagtaattaaataggcagtaaatactagaagcaaaaaagttccaacatttgcaaaattatggaaagaaatattagtcatctgtcctaaaacgtaaccattaattactccctcaaacgaactcgttactgctaagataatgataataacaattaagttaacaggtaaaacagataacacccatttcaagttaatttgtacttctttttctttcattaggcattacctcatttctttaaaaattatattttcactacattgcagaaggtcccaatacatataactcggaaaatgtcgaccacgctaactcttctcttggattttctgcctcttgtaattttcctaatgaatcactaaatgtatttaaatctttcataatatcatcttttttcattcaagtcctatcttaatacaagcataacaattactttatgtatctttggaattttccatatcggttagacttctttagatttataaaggaaaacatggtcccatcacttttcacctctatctattaaattttgtattcttatattactagtttaggattttcagcatttaaaaagtgtcacatatgacactcattttttatacatctttttaacaaaatcattcatgcctatttgctgcaaaaagtttataatttcatgtattcttttataatccttattcaacaagctttcataatattttcccataattaacgtaaaacaatttttaggttttggctctgtttgttttaactgtgttatcgattgccaaactgtttctgtattttgattactaaagcgaaaagaataatctaaataatttaccagaatagctgacataaatttttttaaatcattacttgcataatgatgacatttatctaagatttgccgcattatcacatttaattcctcaatattaaataaattcatagacattgaaaataaacacaaactatatttatcccaattgtcagtttcaaaaattaagttcttaattgtatttatttctgaaataggtattctatctctgttaccttctagatttgcttctaataagactgcaagtgctaataaaatattaattcgtctatcgtgatgttcattctttaaactatctactactttctgaatcctaatcaagtcattttcataataactttctcttaaagcatctatataacaatcatattttgatttcttattattcttttctaacatggagaaaaatttagacggctttatatcatgcaattccaaaatttttactaaatcacaagcttttatttcaaactctcctcgctcaatttttgaataatatgatttagtgagaatattacctgccattttttcctgactaagccctaacatttttctaatttgttttaatccattcgctatcttcataattatcactcttactatcttatctttttctgaattaacttttaaaaagtaatatagcctttcatattacctttgtcatactataaaagtacatagcattctcttataactacacattataatttatattttgtcctaattgatttatcttttttctgtacagtaatctgttcaataaaaatattcttagatttaaggcttacaaagatgacacatctataaacaaaaagctcatcctgctttccaaaactggcttaaaaatcatggtattgaacaatcaatgtctagaaaaggcaactcattagatgatggattaatggagggcttctttggaatcttaaagcgagaaatgtggtatggctttgaaaaaacttttaaaaatctagatgaactagaagaagcaatcaaagactatatttattactacaataattttagaattaagagctcaataaaaaaccatacttcgattcaatatcgaaatatggttttaaatcaaacagtttaataatatgtcctaatttttgggttcatatcaaaatcaaaatcttattcctttttcttatatccgcgcttcatgatacttcttcagtagagtaatattcactaaaactaaaattatatttacacccagaactataaataaagttaagtaattactcgttaggtctgatcttacatcactggcatccttacttaaagtagttaaaaacattccattttgcaaaaagccagttagtgaggtaaaaataacatcgtaagtattaatcaaaaatattaatccaatacaacctaataaaaccacgactaagaaataaaccaatttacttattctttcaggaagaaaatcactaactatttttcccgtaaaattaacgagactcacagcaagataaatgaatataccaattagaactatcaaaacaatgctagacaataaatccattatgtgcatctcttgccataactttccttcaccgattgacccgaagtttttaaaagtagtcttccaaaattcatttgttcccattacaggtattcctgcagcgagaatcatacctatttgcaaaaccactaaataaagaccattaacaacagctgataaaagatttgcaaatagtaaagaactttctttaattggagctaatcgccaagtttgagacgaatagacttcctcattttttcgactcgaaagagctaagtaggctatatcaaatagtggtgtgatcatcagaaaagctactaagaaataagccttactctcaccctcaaaagctgaattaaagagtgcccaaaaacctaaaagaattccaacaatcacttgtaaaattgctagtcggcggacaaggcgtactttgcttttagtcaattctttaaatattgatgaaaaagttgccatatactcttacttcccttcgtggaagttcttcaaaagccaaacattaattgaacctaaaacaatatcaataaatgccaagactaaattgttttctataaatgacattagaccattagtagtgtcaccccaacggacttgatttaataaacttcctagattatttgtcaaaacaataaagataaagatcaaaataatcataatgacaaaacgaattaatttactatgtttatcaggaagaaagtcagtaatggttctacttgatagattgagcaaagtcacaatgctataaaccaaaattgcaaataatataaaggctaaaaatgcacttagtatttctccaattggaaaagcatcagaaaatttttgccaaaagtcgcccgcatgagtttctttagcaagggcccggttaatttcccaaatattagttctaacatctttacttaagaatgctggtaaaaacgtaacaatccccattccaatttgaattaataccaagtaaagcccattaacaatagcagaagaaatatttgctaagtaaaatttacttgaagaaattggaactaaacgccaagtctgagagctatactctttttcgttttgccaagcagagagaactacataggccatatcagctaatggagtaaaagtacataccatgacaaaccacgcaatcggtttatctgaatttgaaaatccaccattagaaaaaagtccccaaagtgcaaaaatagatgcagctactaattgcaacagagctaacagataaacactccggcgcttctttttacccatttgattaaatagtgctttaaaagtagtcatccttattcagctccttcatctgcgtataagctttcataatactcttcaatactttttccgtgtgctcttatatcatctgctgaaagatgactggcaatttttttatcctttacaattactacttcatctaaaattgttgtaatttcatttacaaagtgatcagaaataataattgtactgtctggattcttccaaagtaagattgaattgatgattctctttcgagccattggatcaataccagaaaatggttcatccagtaaatacaacttagcttccctacttaaagtaacagcaatttcaagtttttcacgcattcctcgcgataattgacctaacttcatctcattgttaagtttcatgaaggaacgtaattgttcgaatttactactgtcaaaatctgaaaataatttttgatagaattcctctacttccccaattttagtggaatcactcaatccctttaaattgtcagtcatggcaatattagctttacggtaaacttcactaccatccccattgagcagtacttcaccttgataatgcttagcaataccaacaattactctcattaacgttgtcttaccagcaccattttcacctagtaaggcaataatctttcctgaatcaacatctaagttcacattatcaagaatagtttttaagttttttcgatatgttaattcttttacttcaagtagtttattcattttaatctcccttcttctcctcaataaactttttaagctcttccagcgtcttttctggagttaagcctaattgtgcagtactttctaaaaattcactcattgtatccttaattagctctctacgcttttgtaaaatcaactctgtatctgttgttacaaacgaaccaagtccgcgcctaacctctaaaattccctcgatattcatttgattcaaagcacgctgaaccgtattgacatttactgttagatcaacagctaattggcgaactgatggaactttttctcctggcttaattttccccaaagcgatttgtcgataaagatacttttcaatttgaacataaattggaatattatcttgaaattgcaatctttacacctctttactagtgtacggtttatctattacactattataataccaagatacattttcaaatacaagccataattttgtttcacaatttagaaaatatattttttaataaaaaaatagtagataaaaatgctattatttcaagcattttatctactatttagcagattaatagtatcagtgtaaaactatttttaatttttaattaatttaagatcattgataaataagtgtttttagccattcaagcaatcatagaaaatagagaatttaatcagaatcacttgaaaattgtttcacttatttacttcttatttctctcaacgtttaattgattaatcttacgcaagacgtctactgctttccacatactctcgagtacagtgtattcatagcgtccatgcatattttcttcaccagcaaaaagatttggacaaggtagacccatataagttaattgagaaccatctgttcccccacgaactggatcttcattaacagtaagcccttcagccttgtaagcatccctagctaaatcaacaatctccatgtgcttttctaattcatcagccatgttgtaatattgatcccacattttcagcttaattctttcagtaccaaactcgtcattcatcttcttaacgatgtctttaactagattctttctcttttcaagaccatcacgttcaaagtcacgaatgatgtagtccatatgtgctgaatcaactgttccatcaaaattcatcaagtggaagaacccttcacgaccttcagtatgttctggacgatcatgttcaggcaattgattatggaaatcaatcccaacttgaatagcattaatcatttggcccttagcaacagctgggtgtacattaacaccttgaatatctaagccaaattgcgctgctgaaaaagtaccccagtcgagttttcctggtgcttcaccatcaacagtataagcaaaatctgcaccaaattcttcaacatcaaagtgctctgcaccagtaccaatttcttcatcgggagtaaatgccaacttaatttcgccgtgcttttcttcgggatgctccatcaagtattctgcaaaagtcattaattcagaaataccacacttatcgtctccaccaagtaaagtatcaccagaagcagaaataatagtttggcccttatagttctttaaatgagggaaaacttctgggtctaaataaaattcagtatctcccaattgaatcttagattcaccatcatagttttcagtaatttgcggtttaacatcaaccgaattaaagtctgctgtatcacagtgagctaacaaaccaaaagtaggtacttcataatcaatatttgaaggaatagttgcaattacacatccacttttttgattatagtgaacatctttaagacctagttcttctaagtctttcatgattacatttttttgaaagttttcttctctttcagttgatgggaaacgatctgaatgttcgtcagagcgtgaattcaccttaacgtattttaaaaatctaggtagtaaatttggatattctgccatttttaatcctcctaaaataaatcttgaaatgggttagttgatacctctgaaattactacaggtacattccaattataatcctgattccacttttcaagtcgatctccaaccttatatttaaaaagtttttcagtgtagtgtcctggatcgactactgttaacccggaagagatcatatcgtgaccaacatgatagtatacatctccggttataaatgcatcgactccatcaactagagcttgacgccagaacttaccaccatctccgcaaataaaggctacagttgagattaacctatcattatcagcagtaatcagtcttgccattggaatttgcatcttgtctttaacataataggcaaattccttagctgtcattttcttaggtagtttaccctttctaccaatggcaattccatcagtatctaaggcaaaaggctcaacctcttctaagcctaattcttcagcttgccaatctgctgaaccattttcagccttatcagaattagtatgaattgaataaacagtaattccattagcgattaacttaccgtacattgcattttgaggatcagcaaaatcaagattcttagctggtctaaacatcactggatggtggctaattatgaggtcaacacccttttcaattgcttcatctactacttgtggccgaacgtctaaggtagtcattaccttggtaacatctgcatccattgatccgatttgcatcccaactggatcaccttcagaagcaatttcttcaggaaagtctttttttaagcgagctacaatatctgctacttttgtcattttagtacttcctcaatcatttcaatcaaatcatctatctgactaattttagcctcatctttatttttagccttatttaaattagcttttagattttcatagtaattaagttgcttagtccattttttaataaaaactggatttttttcttttaataaaaatggaccaaattctaattcttgatcagataaattatgtttagcctcagttaacttagccttgattatttcataaatgtggccagctacttcgataatcttttcttctactatctcatactgatgatcaacgagccattttctgactaaaggctcacctatattagcttctaaaattaaagtaggatagatctttccctcttgatgagcagtttctaacaaattagtcatgagctttccacccattccagcgattacgactgtatcaatttggtcactgctctttaaagtttctaatccagagcctaatcttgtctcaatcttatcttctaggcctgcttgttcaatatcttgttttgcattatctaatgggccagctgcaacgtcacttgcaattgcaaaatctatttttccttcttctactaatgcaattggtaaatatgcgtgatcagttccaatatctgctacgcgactttgtggatcaaccattttaccaatttgagctagtctttcttctaacacactctcacctcttattaaaaattttagcatagataatcccaaacttacttgaaaaaatggctgtataatttttcctgttgatgaatatctatgatattctatcgacaggatttttttacgtaaaaaaagaggccatagtcctctcttacttaaaatccttcttcgaccaattcaattaagtgtatggagatttaaactatgtcctctttaaatgattatattaaatttactcttgatattgaagataaaaacattattttttctgattattcaaatgaaaatattaacggtaagatttacaaaatatatttagctgagctgatccagcctacttgtccttattgtcgttctactaatcttaagcataacggtcattacgtctctaacgttcgtttcattactgctgatgctagtaagcccgttactatcagattaagaaaacaacgtgttctctgcaatgactgtttaaaaagatctatggctcaatctaatctggttaataaaggctgctatatctctaacacttctaagcgaaaaatactttctgctcttactgaagatcgttcaatgaccagcattgctagagaacataatgtatctgtcaacacggttcaaagagtattagaagtctgctcttctaagttctatgatgcctttgatcatctccctgaacacttagcttttgatgaatttaagggcgtaggcaaaaagcttcactttatttgtctagatggtgatactcacaaagttgttcaaattcttagaactcgtttcaaacctgatattctacgctatttttacaagttcactcctaaagctcgtgcaatggttaaaacagtaactatggatcttaattgttattatcctttagttgctagagaattatttccaaatgctcagatagttattgaccgttttcatatggttcaaatgcttactagatcgtttaatattttcagagttcaaatcatgaagcaatttaataaaagaagccgtgaatataagcttttaaagtccccttggaagctttatctcatgaaatatgacaaacttaataagactactccttattacgactggcattttaaggactgtctaacacaggaacatgttgtcttagatggtttagattgtgaccaaaccttagaaaatacttattgggttatgcaggactttatgactgctattcaggataacgatgaaaagaaagttatccatctacttcattcaaaacaaaatgttggtaaacaaatgcatcaaactctattaacttttaaacgtaattattctggtgtcctaaacggtattacctcaacttattctaatggttgtcttgaaggagttaaccgtaagattaaacaaattgaacgtactgcttatggttatagaaatttcaaacatttattaattagaattagactcgaagaaaatattataaaagaaaaggaatcaaacagctatttcttagctgcttaattccttcttaaaattatccatcaacaggatttgcaaaagagccgaaaaaatttttaatcataaaaaaagcaataaaggctaaattaatcctttattgctaaaaattcaattatatttacttgttaataatgatatctgatggcttaacatcatcaccaaagtaaggctttaattcttggttgtagtcattaataaagaagccatccttgttaagcttattaatgtgtttattggtccagtcaagaagtgacttattccccttcttaacagcaggagcaatgtatgaatttggtcctaagtgcttgataccaacagtatacttaggattgttctttacccaagcatataagtaagagttgtcatcagctaaggctgcggcacgaccattcttcattgcgttaaattgttgagtcttagaatcaaatttcaaaagatcaacatctggttgcttactggtgaagtaattttcagcagtggtacccttagttacgatcacctttttacccttcaattggtttacattagtaattggcttagacttaggtgaaacaacaccaactgatactttcatatatggcttagcaaaatctacgacttgttttctttctggagtaacagtgaagttggctaaaacaatatcagccttgtttgcattcaaagtatcaacacggttattagcgtttacttgaacaaacttaactttaacgcccatttctttagctaattcacgagctaatcgaacatcatatccaacgcgcttaccatctttattaacccacccatatggtggtaaatcgccaaatacggcaacctttaaagtaccacgttttttaattgcagcaactgaactaggattgttgctggacgaactgctgcttgaattatttgagcaagcagttaaagttacagctccaacagataaaattccaacagcagcaattaactttttaataaatttatgtttcttcattttttactctccctaaaattccatactttctaaaaattcttctgctctctttgttttgggatgctcaaagaattctttcccaggtgtatcttctacaattgttccattttctaagaataagacctgatcagcaatttgctttgcaaagttcatctcgtgagtaacgatgatcatggtcatgtgatcttcatcagataattgtttgattagttccaatactcctctaaccatttctggatcaagtgaagcagtaacttcatcaaatagcattaaatctggatgaagagctaaggcacgaacaattgcaattctctgcttttgtccacctgataattgtcgtggatatgaatttgcatactgctctaaatgcactctttttaatagagcttttgcttctttttcaacctcagccttaggtctcttttgaaccttaactggaccaagcaagatattttctaagaccgtcatatttggaaaaagatcataactctgaaaaaccatcccaattttttggcgaagttgctgccaattcttggcagttggaattactttctttccttcaaaaataatcgtcccgctcttaaattcttctaaaccatttaaacagcgaagtaaggtacttttaccagatccagaaggtcccagtaatgttaatacctctcccttatttagagaaaaagaaatatcatgtaatacttgcttatttccataaaacttgtttaaatcttcaacttctaatattttttcagtcatcccttacgcctcgtttctcttactcaatcgttttgcccaaagtgataaaggataatcaacgatgaagtataagaagaaaatcaatccatatacccaaaaaacaccgttaggattagtttgattatttgcttcaacaatttgttgtccaacattgataacatccataacactgatcatcatcaataaagaggttgttttaattactcttgtagctaaattaattgttgcaggtaattctaattgaaaagcttgcggcaataagacatagataaataattgccatttattcaatccaagagctaagcctgattctcgttgaatttttggtaccgagatcaacgccccacgaacaatatcactaaattcagctgaaacccataaagcaaatgcaatcactgccatcacagatgccggccaattcaagttaaattgtctaggcaaaatataatagaacaagaacaataaaactacggttggcactattctgaagaattctagatatattctaaaaatcacttttactaagcgacttttcgatgttcttaaaacaccaaataatgctcctagtgccaagccaattattaaagaaagaactgcaatccaaacacttgtccagagaccacccagcaaacgggtaaagtttcttccttcgaataaaacattaatccccgaatgtcccatagcgaactctcctttcaagccaagttaataataaagatagtggaattaaaattattgcatacgcaattactaagacaaatagatattcatttgaatggtagtacaagccaatcaaatctaatgctgtattagttaattccggaatagcaattactgaaaaaattgatgtttccttgattaagaaaataatatttgcggcaattgctggaacacttaaggcaaagccttgtggaaagaccacataacgagctaattgccattttgacattccaattgcttcaccagattcaatttgatttttgctaattccatcaaatccaccagtgaaagcttcggccatataagctccacctaaaaatatcaaaccaattaaaccacaagtaatggcgctcatctttaatccaattaccggaaaagcataatataagaagaaaagctgaattaataacggtgtatttcttgcaagctcaacatatgcactgacgatcttatcaattacaggaacatgaaaatattgaatcaagctacaacagagcccaaccaccatcgctccaataattccaacaaaggacatccagactgttacctgaaagcctttgacaaattgtggcaaactttgctgaataattgcccaactcatattttcccttctttccaaaaataagtaactggtagtattatagacttactttaaatcagttacaataggtaagtgcattattttcttatatcgtagtattcatttttgttatagtaaaaaagacatacgccttcccctattcatctttagattcttctctaaaaacgaattggatttacgtatgtctttttaattgctgatactataaactactttatttattcttagatgtattctgatgtgaataccatttggatatactttctatatctcctgcatagaacattctaaaatcttttgcaatctctgaaacttttaatcctttttctacttcataatcttcgatatagttaggaataaaaacatgataaggaagagttattttaaattcatcttttttcttactttggcttataaagttattaacttggtcacttgtgtcagtttctctaaaagcaaaaattctagttccaattgggattttatccccacttttgcgaaagataggttcaacttcgtaataaactattactttcttagattcactatccgtatcattagctttttggaaccaattcatgactgcttgttcaaactggtgttgtcctcgttccttaccattacgacgatttttatcacaaaattgataagctatgtttgaacttacatttttacagaaaaaattgtcggttggttcattttgtccgcaaatatatttttgaaactcccgtgccactaaatgacctttgtctaaaaaagatgatttaggatccctattacctctataaaattttccgattaattctttagctgatcgtgtttcacacttattagataggagtacatcccattttataggcttatctatatctgaaagactcttattatcagataagtatggaaacattggctttttctcagaaactttacttttaatttcttgcataagatctgaagtttgagaatttatagtataaaaatattcatcttgatattcttttatctcgccatacttcgtgatgcagtttagatcttcatgtccaagagctttcattaattcactgaacttcataatttaatatcctattttcaaatgtttctatttatatcatatatacatatctaccatgacaaactttgataaaaaaataaaccgatataattatcggtttattggattttaattgtaccaaagagcgtccatacgaatgtcatttggtgaactttgtgttacacgaattgaagctttttgatacttttgaccatcgctgtttgtcatatcgttccatccatattggtctgccgtttctttagtatcttgtaaaaattcatttttacttgcattagtatttacataatgataattatgcaaagtcatatatgctgtgtgagcatctccaacactccaaggaatgtcatctgatgctgatccatttttcataatgtcgttggtaattgggatattacctttttggtaacctgctggagccatatatatatcccagaagacttgttccatttgaccagtagttaaagcttgcttactattgttaactggagtagctggttgaactggtttagcaggttgtacaggtttacttggagttgcaggttgagcaggcttagctggagtaactggttttgaaggagtcactggcttagctggttgagctggcttgcttggagttacaggctgaactggcttattaggagtagccggtttagttggctctactggcttagatggagttacaggctgtgctggttttgtttcagcaggcttagttggagtaactggttttgaaggagttactggcttagctggaataactggtttagtatcaacaggcttagttggagtaactggtttagatggagttactggcttagctggagtaactggttttacaggggtagtattatgagcagtattgttagtactgttgctactcttgtttccagtaacattgccttgatgtaattccttattagtatgagtagaattatttacaggtcttgaagtagaagcatggcgaatagtatcggaagacttgttagcagtattgcctacaacgctagcgtgatgaacttcattattttgtaagtttttagtattagtttgacttactgatacatattttgcaggaacccattgactttggttacctacacggtacattggttcatgattaatgtcagctttttcccaaactttccaagttgagttctttggtaagtattgactagtgtagttaccttggctgttaactaagcgaacattgcctgaaccttggtaattaatagtagcaacaccaacgtaattttcacgattataagctgcgttatttgctttacttgctacagcaacattttgacctaacttagcatctttccagtcagtgtacttagctggaatccattgcttatcagtaccgatacgatacattaactcatcgttgatataagctttttcccaaaccttgtacttcttgccattcttaacagtttgtttcattacgtgaccatcgcgatcatataagtgaacttcaccttgattttcatggtcaactacttgtaaaacgcctcttacttgtttagcgtgagttgcagatgtagcagcttgtgcttgagcactatttgcaaataatccagcacctgaaagaatagtagctgaaactaaagcagtttttaacaatgactttttattcataattttaaaatctccttatctaacttataattttgattttcgattctttaaaatgactaaatagaatttatcaccacctcttaattagaaacattattagaatctttaatatttccttcttgatacttatttttcaagtatccgtatttatcagctctcttaaaggccttattaaatacaaagaaaataataataaagccaaaaaataaaattagcatatcttctactacatactttacaaatcccaccatcatataccgaacataatcagtggaaaacttatttctctctctaaaactcgcgtcttttttaggtgaatcatcatagctaatccaatacgtaatggtattattttcaggattatactgagcactagttaccgttttttcaggcgtacgatcataagctttcttagcatccctattacgtttaacataagctctcccaaaactttttagccaccacattgtgaaatgtccaaaacgtccatgccatgctaattgaatccacggaaaggtaataacaccggaacttaggataaacaacaataaaattgtacttgggagacgatatggatttaaaattataggaaacaagattattaagaagaaaattgcatatatggttcctagcgtaaatacgtaaaaataccactttaaactaagtaatctttcaaaaaaactcacacttaccacctataaaatttaattactaccaaattcatgattaacgagtctgattccatctttacgtgccctatcattaggcatatcaatttttaaaaccattttatttccactttcacgagaaagatcaagcctcgacttcacataattaagttcatcaatcgctttatccattttgctttcaccaatatcggatttaactggccgatagtcatctgaatcgtattcccactttggattatcttcgacatacttaatagtttgactacttgcgccatacttttttaatatggatgctctaattttacttgcaatccgatctcggtctttatccggaacaaaccaagaacccgtatacgaattccatcccacttgttgaacaccatctaatggatcaacaagactagcctctctaattccaaataaacatatcagaaccaagaagcctcctagaaccgaaacaatgatcttatgcttagaccaaattttcttagctttaataacaaatttattttcttttattttatccatctattttcgaccctattcatcgtcactattatcatcattgttactatcaatagagtcagaattcttagctgctgcttgaattacatcatttggaactgcaattttttgttgattgatattagtgtaagaagctgttcctttatttgaaccagcggtccaatcataatgaatctcagttaactgtttttgtttattaaagctataagttagagtagctgatgtaaagtcttggtctccaaatggattccatttattttcacttgaaacccaaacaatataatgttccattaattctttagcttcagcagagtttccctcatattttgcttgataaccatcactagtttttgagactttcatttgattaataaggggagatggaaggctaatcatcggatcaaatcttccaatcttataagtttgcccaattttagtccatttatcacccgataaactgtagacaaattgatcagttgcccaaacctctgagttcatcccaccgttgaacttataatgtactactcgtggattttcttgaattattcccgtgtcataacctttaacagttgcataattaagccgaatatcaaaattaccttcattaaaggccgaaacattattcatcaattcagtaactgttggtactttttctacatctttcttcgaactacttgccttattaaccttctcactgctctgttttttcacttcaccttcttgcttttccgacttgctactcttagatttacttttcttttcaatcttaactattgaagatttcgacttggcattagtcttagatgtacttgattggttttcattactttgacaaccagctaatgctaaggcacttacacctactaaagcagcaatcccatacttataagacttacttttcactctatttcctcctacactcgagctattagaattaaaataattgaagacgcaaaaaagccaagctaaagaatgaccccattaaagtcatctttaacttggctttttatgtactgtacaagaaaataaggatttaaagtagaaaatcccttagaaacgttgatagaatggctttctaccccccccaatcagagaaatgagagtattgtttcttaattcttgcatagtaacacctccaacttatgaatttattgtagcatattttttgttattttaaagcataggtagttcaattttatagcaaaaaaaccttgcggtaatattgctattaccacaaggtttttgctgttaattcttatcctaatctaagaagtcttttaattgatttgaacgacttgggtgccgtaacttacgcaaagccttagcttcaatctgtctgatacgttcacgagttactccaaatactttaccaacttcttctagagtacgagtacgtccatcatcaagaccaaaacgtaaacgtaaaacattctcttcacgatcagttaaagtatcaagtacttcttcaagttgttcttttaacaattcatatgaagcatgttgttcaggactagttgcatctttatcttcgataaagtcacctagatgagaatcatcttcttcaccaattggtgtttcaagagaaactggttcttgtgcaattttcaagatttcacgaaccttatcagttggcatatccatttcggcaccaatttcttctggagttggttctcttcccaaatcttgcaaaagttgtctttgaattctgatcaacttattaattgtttcaaccatgtgaactggaatacgaattgttctagcttgatcagcaattgcacgagtaattgcttgtctaatccaccaagttgcataagttgaaaacttaaatcctaaacgatagtcgaatttgtcaacagccttcatcaagcccatgttaccttcttgaattaagtctaagaaggacataccacgaccaacataacgtttagcaatagaaactaccaaacgtaagttagcttcagctaattcttgcttagcttcttcatcgcctgattcaattctcttagccaaggcaatttcttgatcggcatttaataatgaaacacgtccgatttccttcaaatacatccggactggatcattcattcttacgcttgaaggtgctgacatatcttttaattcagccttctcaacgtctttttgcttctttaaagctaattttgaaggttcaccattttcatcaacaatactaattccattgtcttcaaattcttgaactagttgatctaccgcttttccttgaagatcatatggcttaattagttgagcagtaaattctttttcagtaatttgtttgtcttttttaacttccttaacaacttccttgacctttttatcaagtgtcattgttgtttctttggtagtcttactctctgccatgtaaaaaagccccctctaaaacttctttcttcttaacgcaattactttttgcgctatttcaagctctaaactattgtcttgttttctttgagcatccttcaattgattaagcaaatcatttaattgctgatcaatcttacttttttccaatgcccgcaattgatcatctaattcgcgcttagaataatctggaggcattgaaatcatctccatattaataattataccttgaagttcttcaggaataaaatcaatgaagccagtaacctctgccccttcatgagtctgatggtattttaaccaaaattctgctaactttgcataacgttcatctggaaacaaaaattgctgactcaataagtaatcccttgcttcatcactgtgtatgaataggtaaagcaagcgatcaagggccggattccttgtctcaaggtcagtacctgcttgctcttctttcggctcactaggctgatctattggaagtgatttaggagcttgataagcttgctgatgattctttgcacgctgtaatttacgtctttcacgcacaaaagttacttttaatgattcacgagtaactccagtttgacgtgctaatttatcaagatacaaatctgccgcaactggatcattcaggccagcaatcatttgtacactagccgtaatatatcctagcttctctcgatcattatgtaaattatattgattagccaatctttcaagtagaaaatccattgagctaagtgcaccagcaacctctgtttgatatttctctactccatatttctttacatactcatctggatcgagattttcgggtaaaacaattattcctaaattgaatccctgtacttgcccaaatagcttcgttgctctttcagcagcatgaatgccaggcggatctccatcatagttaattaagatattgggagtgattcgtctcagcatatatacttgttccgtggttaagctggttcccatcgaagcaacaccagactgaataccagccttataagcagcaattacatccatatatccttcgtaaagaattaaatgtttttcacttcttgccgctttttttgcttcagcaaagtgaaatagtaatttagatttattaaaaattttggtttctgggctattcatatatttagcaatagttttatcattactaattcgtcgaccagaaaatcctactgtataacctgattcatcccctaaaggaaatattaatcgatcacgaaaacgatcaaatagttgtccatcttgtgattctacaaataaaccactttctcgcagttcatcatctgtataaccttcttgacgaagataagttaataaaattgtatcgttatcaggcgcatatcccaccttaaaatgctctaagaggtcactagttaattcacgtttttgagcatattcaagtgctctttcaccaactttagtggttagcaaaatatgctggtaaaattctgttgcttgccgatacatcttctttaacgggctaagtggctttaccgtttcgccgtagccttctggcatatgaagatgggccaattcagcaacttttcttacactttcaggaaaagtcagatgatcctgatacattaagaatttaaatacgtttccgcctttaccacatccaaagcacttaaaaaactgctttccttcattaacagtaaaagaaggcgttttttcttgatggaaggggcaaagtcctaaataatctttaccttttttttctaaagagacatattgacttattacatccacaatatcgacagagtttctaacttcatcgataaattgttcaggaatacgtcctgccatcaatggatcatcccaatcaactattatttaattactaatttacttaagtcacccattcgatcagctaagttattaacctttaataattgagccaaacgattattctttaccttttcatccttatcaagaatcatattgctttcaaagtaattattaattactggttgtaattctacaaagcctttataaagatcggcaatactcaaatcagtattttcctctaatgcatttacaccagcatacaattcttcttcactaacatcttggaaaagactttcatcaatgtcattagcatttctatattttgctttcttcaaaatattagtaattctagtcaagctttcaactactggcttaaagtcagcatcatcatgatgcatttgcaaggtcttagcagcagccaaaatttgaattggatcttgctgactagatgcaagaacagcgtcaattacatcatagtcatatttttcaacttgtaattgttgctttacacgatcacgaataaagtcggcaatttcattttcagcttcagcatccttaggtaacttagctgcggtcttacctgatagtaattgaatcaattctggtaaaacatccttaataggaagtgaccaaccttcgttcaataagattcttacaattccgtatgcgtttcttcttaatgcatatgggtcattagatgaggatgggatcattcctgcaccaaagaatgaaatgattgtatcaagtttatctgcaattgaaagtaaggaacctacagtagtacttggtaagtcgccttcagcactagttggcatgtaactttctttaattgccacactaacattttcattttcaccaattaagcgtgcatagtgcattcccatgacaccctgtaattcagcaaattcaccgaccattgaagtaacaaggtcaaatttgtagatatcactaactcggtcaaagtctttcatttcagtatctgaaacattaaacttcttaccaaggtaatcaccaataatttgaacacgtgccatatgttcagctaccgaaccaatcttatcatggaaagatacgttcttaagcttatcaacgaagtgagctaatgggtacttcttatcttcatcatagaagaattgagcatcatctaaacgagcaacaagaactttttcattaccagcgatgacattatctaagtattcactatttccatttctaactgaaatgaagtgattaattaatttgccgttttcatcatagacttcaaaatatctttgattatctttcattgaagtaattaatacttcatcagggatgttcaagtatttttcatcaaaagaaccagcaaatacagttggatactccaccaaattagtaacttcttcaagtaatcccttgtcaatattaactttccagttatgttgagcaacgagttcttgaatttggttaagaatcatacccttacgttcatcggcattagcaattacgtattggctctttaatgcttcttcataatcatctgcgttagctaatacaacactgtcacctaagaaacggtgaccttgagttttacgaccagctactacatctagtaacttaactggcactacttcactgccaagtaaagaaaccatccaatgaattggacgaacaaattcgaagtcgtagctaccccagcgcatcttagttgggaaagtcattgctttaacaatatcactcattcccattaagatatcagaagcttttttaccttctttttgaacatgaacataagcatattcagtgcccttaagctcttcaaagtaaatgtcatcagtagtcatcccttgaccacgaacaaatccttgagcagcttttgtccaattgccatctttatcttgagcaatcttcttagctgggcccttttttacttcatcaatatcttcttgtttttcagctaaatcttcaactaaaatcgttaaacgacgtggagttgaataagtcttaatatctttaaaggacaaaccattttcctttaaatactttttagtacgatcagctaattgcttaacacttttagaaacaacgtgagctggcatttcttcagtgccaatttcaaataaataatctttagtcattgttttgccccgctttcttagtttcttcttggtgctttaataatgggaagccacgtttttcacgttcttcaacaaatcccttagcagcaagatgagctaagtttctaattcttgataagtaacccgctctttcagtaactgagactgcaccgcgtgcatcaagcaagttaaaggtatgactacattttaagatgtaatcataagctggatgaattagattttgactcaacaagcgcttagcagtagcttcgtaaatatcaaagaacttaagtaattgttcttgatcactttcttcaaaagcatacttagaatgttcatattctggttgcttgaagatatcacgatacttaactccatcgccccattccagatcaaagactgagtttacatcttgaatgtaagaagcaagacgttctacaccataagtaatttcactcatagttggtttaacatcaagttccccaactacttggaagtaagtaaattgagaaacttccattccatcaagccatacttcccaaccaacaccggcacaacccatagatgggtttgcccagttatcttcaacaaatcgaatatcatgttcaagaggttcaatacctaatactcttaaactgtctaaatagtattgttgaatgtcctttggtgcaggcttaataactacttggaattggtggtgttggtataaacgattagggttatcaccatatcgaccatctgcaggtcttcttgaaggttcaacataacaagctgcccaaggttctggtccaacagcacgtaaaaatgtatatggactcattgtcccggcacctttttgttcatcatatgaaggcataatcatacaacctttagaggcccagaactgttccaatttaaaaatcatatcctggatattcagtttttctgacatctatctctctcctcacaacataggcataaaaaaagcctatgcaaaaattgcatagggacgatttacttcgcggttccaccctaattcaggaaaatattcttcctgcccttaattaacaactttgactaaaaggtgccttttcccaaatgcacttccaccattctgcactcgctgtattggtacttttctattcctttatagttgtcaaaatacgtatctattttatcatcttttacaaaaaaagactagtaagaaaacctcactagtctttaaacgaatataaaaagtcaacagctaaaaaagcgccaattcatcaagaaattttttagtttttaaattaagatccagatagttaacgtacatccgatcgatcaccttgccagagtccttttttaattgcggattaatttttattttccctaaacgatcaatatcaactaaagctagagtacgaatcaaggctactactttaggatctaaatgcatcctttgactgacactattaaagtgatcactacaaataattccacctaattccaatgagtagtcaaacttaccttgtactttaccacaaattaaacaacgatctaattgtggcgctactccatatgcattaagcaacttcaattgtaccatctgggtaataattgctgcatcttctcctgaatttatcttcagcaacgcttttataatcaaatcataaaaacttccaatatctttatattcaacaaaagcatggtcaagcaagtctaaaacataactcgaatacgcattcttcgttaaatctaaatataactggtccagctgctttacatccttgaaagtccgcagcgtactgattcctttccaatttgtatttacaatatactttccataagagaagttaagggttgcagctcctaatctggactttggtctcagtgctcctcttacatctattgtaaaaataccatgatctttagtcatgatcttggttagaacatcagcttctttatatttttttcttttaaaaattaatccttgaacttcacaaagttcacgtgccatctatcttaattccttagcgttgtagccaatagatttaagaaaggcaggatcggaacgccaattcttttgaaccttaacccataggcgtaaattaactttttcacctaataaagcttcaatttcctgacgtgcagcaattccaatctgcttcagcatttgacctttcttgccgataataatgcccttttgaccgggacgctcaacataaattgtagcctcaacttgaagcttgccaccttcatgatcccgcattcggtcaactaccacggccgtagcatgcggaacttcttcatgagtgagcttcaaaacctgctcgcgaattaattcagctacaataaaatattctggacggtcagtcaattggtctgcatcataaaattgcggaccttctggcaaatatttagcaattgttttaatcaactcggaaacattatttccttgtgaagcagaaattggaacaatttcagcaaaatcgcctagattcttatatgaatctataatagataataactcatctgggtggactttatcaatcttatttatcactaaaaatacaggctttttaattttcttaagaagttcagcaatatattggtctcccttacctgctggttcaggttcaaccataaataaaaccacatctacttcatctaaagcagagtaacttgacttatccataaagtcatctaatttattttttggcttatgaattccaggagtatcaataaaaacaatttgctcctgatcatcagtataaatacctgaaattttatttctagtggtttgtggctgtggtgacataattgccactttttgccccactaaataattcaagagagttgatttaccaacattaggtctaccaattaaagctacaaaacctgatttaaagtctttcttttcatccatcattgttacatcctttttaattaagttttagtgaatttgcttcccgtgattttcttgatcaggatgaagcggaagtccatattcacgtaaaactttaccttggataccaaacatcaccttggcttcatcatcttcgatatgatcataaccatttaagtgaaggtatccatgaactagtgtatatccaaactcccgattaaatccagtttcatactctacactatgtcttttgatgacttcagggcaaagaaataaatccccaatatcttctacaaaatcaggatcgtcactaaaagcgctaataaagtcttcatctaatccatcttcaattgcaaaagaaattacatcagttggacgatctttgccgcggtattttttattgatttcatggatttttttggaagaaacaaagttaatactcatttcttgagtattctctttatgaatctctttttttgctgataataataagttgctaatccatgtaatccaatctttatcgctatcttttaagaaattaacttcatcattaaaagaaatatctaaattattcaactcttagtgtccctcttcttcatatgctctaacaattttggccacaacgggatgacgaacaacatcattaaaagtaaagttaataaattttacttgctcaatattctgtaaaatatgttcagcttgtaataatccactctttgcttttcctggtaagtcaatttgggtctggtccccattgacaaccattttagaattaaatcctaatcttgttaaaaacatcttcatttgtgcctgtgttgtattttgtgcttcgtctagaattacaaaagcatcatccaaagttctaccacgcatatatgctagaggagctacttcaataaccccacgttccattaaacggttggttggctctacacctaaaatagcatataaagaatcatagattggtcttaaatatggatcaactttttcttttaaatcccctggaagaaatcctaatgattcgcctgcttctaccgctggtctagtcaaaataatccgggacacttctccttttttaaaggccgcaatcgccataactacggctagaaaagtctttcctgtaccagctggcccaattccaaaaacgacatcatatttttgaatagcttcaatatagcgtttttgtcccatattcttaacgcgaactggacgacctttagcatccctaattagaattttattatataattctccaaaaaattctaaagttcccttatctgccatcttaattgcgctaacaacatcagttgcagtaatagtaactccacgggtaacaaccttatccaaagcagtaaaaatttgcataattttcttaacaatgctttcttctccggttacttcgatttcactaccagtatcagttacctgcacatcataagattcttcaattaaacgcaaatttgcatcgttaattccaactaaattcatgattgtttctggtttagttggtgtaaatgttgcttctatagtagtttgtcccacttaaaatcctccgtttaataaaagctattagttaagctttttaccaacaattgaagaagctgctttaccatcagccttacccttaatttttggcattaaagcttgcataactttaccaaagtcttttttagaacttgctccaacttctttaattgtttcttcaacagtttcttcaagttcttccttagacatttgctttggcatgtatttttcaattaatttcatttcattctttgtttgattaattaaatcatctctgccagccttagtaaattcttctaaagattcttttcgttgtttaagagcgctggacaaaactgttaattcatcatcactagttagatcatgtcccactttaattttataattcattactgccgccttaagcgagcgaattgtagttaaagctcccttatctttggctttcatagctgttttcatatcttgcattaaagtatcatttagtgacattgtatttaattctcctctttaatcaaaacttacacagtctattttaaactttttatataaaaaaagctcttgatagaagaattttctaccaggagctttttctatattaataatgtctacgcttacgagcagcttcggattttaactttctcttaacgcttggtttttcgtagaattcacgcttgcggtattcttgcaaggtaccacttctagaaacggaacgtttgaaacgacgaagagcatcatcaatagactcgttttcgtgaacgattgtcttagccatgtgagatccctccttccatttcttggcacacaaatatgtgccacaacaatatagttaaattatagctaaacgagaaaaaacggtcaatagtcgattaacatttttcttacttattttggtataatttagataattaatgaggtgaaatatatgactgaagaaaaaaaagaaaatcaaaaaattgttaatctaattattatttctgactctgttggtgatacagctttcaatatggtacaagctggtgcggtgcaatatccaaatgttaagtttaactaccgccgctatccttttattacaaatcgagaaaagctagaaaaagtttttagtgaaatcacagaatttgaaaatgtattaattgcctttaccttgattcacgaagatgaacaattggccgtaattaaatttgcacgtgaacataatatgaaatacgtcgacttactttctggcgtaattgataacattcatgctttaactggcgaagaacctaaacatgaaattggtgctgtccaccacatgggtcaaaattactttgatagaatttctgcaatggaatttgctgttatgtatgatgacggaaaagatccaaaaggtttcttagaagctgacgttgttttacttggtgtttctcgaacttctaagactccactttctttattcttagctaacaaaaatcttaaggtcgctaatttaccacttgtacctcaaacccatattcccgatgaaatctataagattaatcctaagaaaatcattggtttaacaaatgatccgtccgttttgaacgagatcaggcgacaaagaatgatagcctatggtttgaacccagatactacttactctaatatggattctatcaatgcagaacttgaagcagctgataaactttataaaaaacttggttgctatgtaattaacgttgctcatcgttcaattgaagaaacagcagcactaattttagaacacctcggtattgatgactacgctaagtaacaaataaaattaaatattttaaaaagatctttcattaaattttgaaagatctttttttgcttctattattttttatcatatccaaaatgttttttagcctgatcactcattttctcaggactccaaactgggtaccaaacgaactcaacatcaacatttttgacttcaggaaccttcataaccgcagcattaactaattcaattaatacttctgttaaaggacaagctggagtggttaaagtcatattaattagacaaattccatcttcatctaagtcaagctcgtaaactagtcctagattaacaatatctacccctaactccgggtctatgacagttgctagttgattaataatattttgtttaatttcttcactagtgcgcattttaaacatcttttccaaaaattctagccttaatagcctgtcctgttggagtgcctgctaatcctccaataccagtttctcttaatgctactggcatttgatggcctacttttttcattgcttcaatacactcatcagctgggataacactagtacatccagctaatgccatatcagctgcaattagagcgttcccagctccaattgcatttctttttacacagggtacttctactagtcctgctattggatcacatactaatcctaataaattagacatcgcaatcgctaaagcttgggagctttgcctaggtgtaccaccagctatttctacagctgctgctgcacccattgcggacgctgaaccaacttcagcttggcatcctccggttgcaccagctatttccgcattatttccaataactaatcccattcctcctgcagtaaagagaaagcgaatcatttgctcttcatttaagtcgagctttttttcaagcataaataaaatacctggaagtgtgccagaagagccagctgttggggttgcacaaatgacgcccatcgcagcatttacttcatttgtcgctacggcattttgcacagcttccatcataaaatcaccagaaagagtatgacctttttcacgataattctttattttaatcgcttcaccgcccgttaagccagtatgagaaaatactcctttaccagtacttcccttactaaccgcagcacacatggtttcaagattatatttcattttattccatactttttctcgtgataatcctgataatttgcgttcttgttcaattatcaattctgaaataggtttttcttgtttttcagcgtctgcaacaatttctttaacatgattgtacattagtttctcatttcataaacaaacaatgtttttatattttttcttgagttctccaattaaagaaagcttgaaatagttttgaatatcatattcatagatgtagtattcagggcttttataaattctgctttcattaaaaggtgccttttgttgtaaaaaggaagttaaggatctttgattttttatttttctttctgggtcaatcaataaaacaattggtaacgtaccgcttggctcaaccacaatatcgtggattactaggcgtcgaatttcgattgccccaccaccaatggaacagcctgctaattgaacttttttatgaccgttagtcatatctaaaatcgccgtatttgggtgatgaatcgggctttctcccttttcctctacaaacctaatatcaatgccgcgcttacgggcaatctccggggcttttggtactcgtaagtcagaagtagtaaagcccaaaattcctgctgcaattgcataatcagtaccatgtccacgatgagtttgagcaaaagagccataataatgaacagtaacctttttaggaactcctccaaaaagtttgtttccttctctgccaattgctactgcaccagctgtatgtgaactagaaggtccaatcataactggaccaatgatatcaaaaacacttttaaaacgattttccatgttagatttccctatataaaaatatttttaaagaaaaacgaccatttcctttgttatataaagtgaaataatcgttttctagtaacatctaaactggcgtctgttctttgaatcttccatataccttcgaaacttcgcttaaactcatgaaggcatacggatcattatttaagacaatattataaatgtcatacatatcatatttatcaattaccattaataaaactgtcttttcagtatgactatatgcaccctcggcatcatgcaaaatcgtaatcccacgatgcattttagcctgaattccatcaataatatgtttaggatgttctgttacgattaagacttgcatcttttgatgttgattatagacagcatctattaccttaccattgacaaagatgtttaaagccgtatatagagctcgagtccatccaaatacaaaaccggcacagattacgataattaggttaaaaaagatatttatttgaccaaaacttttaccagttttctttcgtaagataattcccaagacgtctaatccaccggtagagatacctgattttaaagctatcccagtaccaacaccattaattactccaccaaaaattgcacaaataattggatcatagctcatcttaattggagcaataattttcatcataatagatgccaataaaactgcaattaaagtaaaaatcgtaaaacggtggccaattttaaaccatcctaaaataaataatgggatatttagtacaaaatacattactgatgtagctaatgtaaatggcaaatatcgttctgataccgactgcaaaatttgggcaaaaccagtaattccagaagcataaattttaccaggttgccagaaaaagtttaaggcgatagcaacggctaaagcataaaacaaagctgctgataactttgaaattaaaatatggcgtcgcgaaagcctttctaatgtactcataattttcctcttttactatgtttataacgtatctagtgtaaagatatttatagttaaaaacaagtctattttttccaatgttctttgataaattgttctctccctcccgcttcttctagagcataacgagctggatcttttttatagaaatcttgatggtaatcttcagccaaatagaaaggctttgctggttcaatacgggttacaattggatctgaaaacttatttgaatctgctaaagatttacgtgattgttcagcaatttctttttgttcaagtgaattatagtaaataactggttgatattgactgccacgatcttgaaactgtcccatagcatcggttggatcagtaacttgccaataaatattaactaaatccttataagatagtttatttggatcataagtaatgcgaacagcctcagtatgcccagttaatcccgtacaaacttgttcgtaagtagggttaggcacgaccccacccgtataacctgattcgacctttatgacaccaggatatgtatcgaaaggagcaaccatgcaccagaaacatccgccagcaaagatagctgtgtcatagtgcgaattttcattgatatcaagggatttaacgtctttcatacttttcactaactttctaaaaaaatcaatatttatcaaaattgtggtactttttaggttcctatttcttttaattcattcatatatattattaatggaaattacccttaaagcaaaaaagtcactctagaacatcagatctaaaataactttctttttatatttacttgctttcctttaactttgcttttctttcctctatataactttctatggcttttaaatcttcttcagtcgccaacttaagaataaagttctttgtagtggatcgtttaactatgtaattctttctagctttattattttcatcccattttttattagctttttttctagcttctgttagtttaatcattaaatatcatctttctaatcaaatataaaacaactctaagtgatattgtatattgctatgataacagatttatagtttctttcttagtcataatatttagctttatagcctacaaggctgttaagtgcatcgattagccagcgtttatattaaatctattttcaaaacaacactttacataattattttaacgtaataaatataaatttattttatctgcaaaagaataaaaaaatccatctcttgattatataaaatcaaaagatggattttaaataaaactaattttcataaatatcattaagcgctttttcaaattcaggaagccagctcattttatatccagcacgagtgggatgaatatcgtcaaccatatagagttgacggtctttttcattgtaatcaaagcgcttgtcatcccacatattaagaaacttaaatttccattttttttgtaattcttttgttgcttctactaatttaccatatttttcagaatcaaaagatggattagaataaatcaaaacaggacaattccaagtctttttaacatattctaaaatgaattcaattgctccaatactagttgtaatatcatatttgtcactttcactaattttacctaaaggaatatcagctttagcatcattagttgaaagttgcaaaacaaacgcacttatattttctaaaattgggagtttctctaagcgcgccacataagaattatcaccattttcagctaaggttgttcctgaaacagcttctttaaatggataaatcccatcttttttccttaaataatctacgaatgattcacttaaggcacctgcaccataagtaacagaacttcctaaaaaggcaacctgcttatcttgaagcttactattggtagcctgagtcgcacttacactgtattcaacctgattaccagaggctttaactatttttgtcaaaaagtcttcatgttgaccagcaaactctaataattcaggaatattttcttctggaaccttcaaattatcaaaaacttgtattaaattcatgatcctattcctcaaatatttttttatattgattatagccttcctcttctagcttatcatatggaatgaattttaaggaagcagaattaatacaatatcgtaagcctccctgatcaactggtccatcagtaaaaacatgacctaagtgggaatcagcaatggggcttttcacttctgttcgctccattccatgagattgatcccgtttataacttaatttttttattggcttcgtaaaactcggccaaccacagcctgcatcatatttatcttgacttgaaaaaagtggttcaccagaaactacatcgacataaattcctttttggttgaaatcgttatattttccactaaaaggcatttcagttgctgcatgttgtgtaacttcatattgctcagaatttaattttttaagagcttcttttttatcgaacattttttcaccttctaaaattaaagatatcaaattttaacataaaaatgttgtctcatgatttttgtttctatacaataatctataatattagagggggattttttatgccaaaattatcaaatgatttatcacttacaaaaaatacacgattaaattctttaggaccttcaaaaattagagcttttgatgaaaaagcttctcaaatcccaggaattattaaattaacgattggagaacctgacttaaatacaccagatcatgttaaagatgcagctattgccgatattaaagcaaacgactcgcattatgcaccacaagcaggtaagcctgagttattagaagctatcagcaactatctcgatcgcagccttgatgttaaatacgatccaaaaactgaaatttgtgttacagttggagccactggagctttaaatgatgtattcatgtcaattttaaatccaggtgataagattttagttcctacgccagtatgggcactctactttcaactaattaaattaaccggagctatcccagttcaaattgatacttcaaaagatgattttatcctgactcctgaacatcttgaaacagtactacaaaatgaaggaaaaggtgctaaagcaatcattttaactgatccatctaatccaacaggtcgtgtttatccagcagccactttaaaggcacttgcagaggttattaccaagtaccatctcttctcggttacagacgaaatatatggtgaattggtttacgataataatgttcatcattctttatctcaatatattcctgagcgcaatattctaatttcaggactttcaaaagcatatgcaatgactgggtggcgtttaggatatattgcagctcctgcagatattatgaaaaccattcaaaaagtaaatgcttttcttgttacctccgtaaccgataatgttcaggctgctgcaattgaagcactaaataatggacaagcagatcctcttgaagcacgcaaaatttacgaagacagattggaatttatgaaaactggtctagaaaaattaggctttgaaatgtctactccacaaggagctttctacatttttgctaaaattcctgatacttttggtaccgacgacgaagccttcgctaatgaattagccactaaagcaaaagttggtgtgactccaggtcgctatttcggtaagggcggccaaggatatgttagaatgtcttacgcttcttcgaccgaacaattacaagaagccttaaaacgaattgcaaaatttgttgaaaatatctaaataaataaaaaattgcattacctgctttaaaagttaggtaatgcaattttttattactcaaatttttaactaagattattcatcccaagttgagttcttatcggcatcttcttgagcttctttttcaagacgttgttcagtttctttaacactatcttcatattgcttttcaacttcaataccaatgtcagctaattgttgatcagcaactggagctggagcatgcatcattggctcagaagcagaagcattctttggaaaggcagtaacgtcacgaatgttgtccttacctgctaacatcatagctaatcgatcaagaccaatagcaagaccagcatgtggtgggaatcccatatctaaagcatccattaagtaaccaaattgttcataagcacgcttcttagtgaaacctaaggccttaaacatcttttcttgaattgaacgtttgtggatacggattgatccaccacccatttcatctccgttcataacaatatcgtatgaacgtgcatgagctttatgaggatcagtatctaacaacttaataccttcgtcatctggcatagtgaatgggtggtgagcagcaatccagcgacctaaaccttcatcatactcaaacaatggccagtcaactacccatacaaagtcaaagacaccttctggaataataccagtttcatgagcaaattcacgacgtaggtgatcaagtgaatcggtaacaaccttccacttgtcagcaacaataacgattaattcgccgccttcaagatcaaattctttcttcaaagcttctttgttttcatcagttaagaaacgagcaataggtcctgaaaattcgccatcttcatatttaacccaagctaaacctttagcattgtagcgcttgatgtagtcttgtttttcttcaatcttcttacgtgaatattctttagcaccattcttaacagcaatacctttaactacaccaccatcagcaattgcaccagagaataccttaaagtcactatctttgaagattgggcttaaatcatgaaggtacatttcataacgagtatcaggcttgtcagaaccatacttgttcattgcttcgtcccaggtaatgcgcttgattggagtctttaaatcgatgttcataacatctttcataatcttctttaaaagaccttcagtatagtcttgaacaccttgttcatctaagaaagaagtttccatatcgatttgagtaaattccggttgacggtcaccacgtaagtcttcgtcacggaaacaacgagctaattgatagtatttatcaaagccagcacccattaataattgtttaaataattgtggtgattgtggcaaagcataaaaactacctgggtaaattcttgaaggaactaagtagtcacgagcaccttcaggagatgatttacctaaaattggagtttcaatatcaataaagccttgttcatcgaagtattcgtgaactgccttcaaaatctttgaacgtaaaataattgctctttgaagagttggacgacgtaaatcaaggtagcggtacttcaaacgagtttgttctgccgcattaatatcatctttgatctcaaatggtggtacttttgatttgtttagtacgtcaatttcagtagcatctacttcaacttcaccagtcttcatttctgggtttacacttgaacgcttaactacttttccctttacttcaattacatcttcattattcaatgaatcagcaatttccattaacttttcaccggaatctttgttaacaacaacttgtacgattccttcacggtcacgaaggtcaatgaaaactaagtttcctaaattacgaacacgttgaacccaaccataaagggttacttcttgtccttcatatttgctagtaatattaccagcgtaatcagttcttttgtccatatgttccatgttaatcctccaatttatttataacatcttgcatattatttatatcttctaagctaagatcgatagttttaccatcacttaaacgcttaatatttaaaacgccattttctaattctttagctcccaaggtaattacaaatgttgcatgaacgcgatcagcttttctaaactgttgtttaagcttcttttggtcaacatcatattgtgcactaaagccttgttcacgtaaactacgtgcaacttcaacagctttaaactcagttcctgcaccaatattagtaataaagaaatctattccttcttcttggaaaaggtccggattttgctctttcaatacaagcattaatctttcttccccaataccaaaaccaactgcaggtgtttctggtccatcaaactcttcaactaagtggttgtagcgtcctccacctaaaattgtcgttgctgattcccatagattcttatcttcaaccatgaactcaaaaataattccagtgtagtaatcaagaccacgaactaaatcatcatccattacatagttaatgcccaattgctctaacatatcagtaattgttttaaagttttcccgagattcatcatctaagtaatcaacaatcttaggagcattaggtaaaaacttcttatctcgttcatcttttgaatccaagattcttaatggattttgacttaagcgacgttgtgaatcttcagaaagttgatctttaactggtgtaaagtaatttaccaaagcatcatgatatgcttcacgaacttgagcattacctaaactgttaatgtgtaattcataatttttaacacctaattcagcgagtaaatcatgtgccatcattaaagtttctacatctgctaatggactatcagagccaaaactttcaacaccaatctggtggaattcacgttgacgaccggcttgtggtctttcatatctaaaagtattgtcaatgtagtaaacgctaaatggctttacaacatctggtccataaagcttattttctacgtaagcacgcactacaccagcagttccttcaggacgcaatgcaatgtgacgaccacccttatcgttaaagtcgtacatttcttttgaaacaacgtctgaagtttcaccactagaacgtgaaaaaacttcataattttcaaaactaggtgttcttatctcacggtaattagctcttttaaaaaagttcctagcaatagattctactttttcccatgaaccagattctcctggcaaaatatcgactgtaccttttggtctttgaactttcatttaatcatcctttaatatattaataaaaaagcgcccttgaactgagtcaagggcgcaataaattagcacggtaccaccttttgcttgctgcgattaacgctcgcgaaacgatccattatctgctaaaggtgtcacagatcgcaacctatccgctattctcaccaaacaagcggtctctgagatagatcatgctaatctacattcttcgtcatcgataattcctttttagcttatatttttcagtcaacaaagtcaacctttgtaagcctttacttaaatattttaaatgtctaatacaattgtaaagggaccatcattttctaaactaacctgcatgtcagcaccaaattcacctgtctcaacatggaagcctttatcctctagttcatgattaaagtcttcccataattgttttgacttaggtggacgcatagcttctacaaaacttggtcgatttccctttttagtatttgctagcaaggtaaactgactaacgcttagaatttcaccattaacatctttcaaagataaattagttttaccatctttatcttcaaaaatacgtattttagcaattttatcagctgcttttttaacttgttctaattcatcgccattccgtaagcccactaatagaagaaaaccacgcttaattttacctacgacttcattatcaatagcaacttgtgccttatttactctttgaataacaacacgcattaattaattgacctctttgcttcataaacatttggcacatccctcattcgacttaaaatatcttccaaatgagctgcatctctaactgagacagttgcataaatatgagccatgttattactatctacttttccagaaatattgacaatattcttagtcttagaatttagggcattgattacatcacttaagagacgagaacgattaaaaccataaatttcaatgtcagcattatagttttctttattcttgtctttagcgatattttcccaagcaacatcaatcagtcgaccctgctttttagcttcttcggttatattcggacaatctgcacggtgaatagttaccccgcgtcctttagttacataaccaataattggatcaccaggaacaggattacaacatttagctaaatgcagcattaagtcagatacaccctggaccataaccccattattatgcttaacacgcataatatctgctggagcatctgaatcgttatcttcttcagtactttgctgaccagcgttcatgattttctcttcaagttgacgttgcttttcatcttcagcctttttacgtaaatcttcagttaaacgatttgcgactgttgccgcagaaacttcaccatacccaactgcagcaaacaactcttcatcgttgtgatagttgaaatgatcaataactcgctgaacatcagctttagtcatgaattctttaggaactaaatcacgatttgataattcttgttcaatcatgttttgtcccttttcaatgttttcttctctatcttcagtcttaaagaagcgcttgattttattacgagcacgtgaagttttaactaagttaacccagtcgcgagatggacgagctgatgcttgagttaacatttcaacgatgtcaccagtttttaatttgtagtctaggggaacaattttaccattaattctagccccaacagaatgtgcaccaacttctgagtgaatcatataggcaaaatctaaaggaactgagcctttaggaagttcataaacatcgcctttaggtgtaaaaacatataccctatctgagaagatatctgttttaacactcttcataaattcatgagaatctttggtctcattttggagctcaagaatttcttggaacatgttgagctttttatttgcatctgtttgctcaacttctcccttgacgccttctttatatgcccagtgagccgcgacaccgtattcagcaacttggtgcatagcctctgttctaatttggatttctagcggcttgcctccaggtccaataattgtagtatgaagagattgatagccatttacctttggaacggcaatatagtccttaaaacgacctggcattggcttccatttagtatgaactgcacctaaaacagcgtaacaatctttcacagatttaactattactcgaacagctaataagtcataaatctcgctaaagtctttgtgcttattaaccatttttttataaattgaataaatatgttttggacgaccataaatctcatacttaatgcctaagctatctaaagtttgcttcaaagtcgaaattgcatccgcaatatatccttcacgctcacttcgcttagactgcattaaattaacaatccgataatattgttgtgggttgagataatgtaaactcatatcttcaagttcccacttaatcgttccaatacctaaacgatcagcaagaggagcatagatatctaaagtttcgtctgcaattcttctttgtttatctgggcgcaaatggtctaaagtatgcatattatgtaaacggtcggctaatttaaccatgattacgcgtaaatctttagccatcgcaattaacatcttacggtgattatcagccaagtattcttcatggctcttagatttatattgaatcttacttaatttagtcacaccatcaacaataaatgcaacgtccttaccaaatttttctttgatatcatcgttagttacaggtgtatcttcaaccgtatcatgtaaatatccggccgctactgtatcaggatctaaacgtaaagttgccaatgttccagcaacttgagtgggatgaatgatataaggttgtccggaaactctgaattgaccctcatgtgctttcttagcaaattcatatgctgattcaacaaaagctaagtgttcatcattcatatatttcttacattcagcaagaacttcttcatgagtcatttcatgatattttgacataacgtatcacctattctttatttcttttctttgtaaaaatcatcatgccataaaccaaataattcaaaacttaaatatactaagcacaataagaagttatatttagcaaagtgaatgaaaactgcaatagcaaaaactacaggaaaaagaagtagccaccaacagcttaactttctaatttgcataatacgaccaatttggtagcttaaataagtattaaaaataaagaaaactagtccaattcgccaaactcgacttagatgaacgagtggacagataatccaaacaattactcctaataaagttaaccaaataagaggcataaatgatttttcatttattttactccatgaagccttaaaattaaaatttttcttttcttcactatttttcttcatttttcgcttaccttttcttttaattaatatttttaatttggttttctagcaattaatagtccaatccagcggccttcttgcattttcattttaattacaaaattattctcttctagcgccttctctattttgggaagttgtaaataatcaattcctgaaaaaataattttaccattttcattcaaatgattatctagatccggaattaattctaacagaatatcagctaaaatatttgccacgattagatcatatttttcatcaatatcttttaacaaattagccttacgcacatcaatattatcaatattatttaaggcaatattttctttagcggcagtaacagcttcatcagagatgtcagttcctaatacatggcttgctcctaacttacttgcagcaattgccaaaataccagagcctgtaccaacatctaaaacagacatcggcttaactaaagcacgttccatagcaagcaaaactaactgtgttgtcgtatgcccaccagtaccaaaggcaagtcctggatctaaacgaatcagttgttgatcagagaaagctggttgatagtcttcccattcgggaacgatagctaaatgtcttgaaaagtcaatcacatgatagtatttttgccaagctgtattccaatcttcatcagccacttccttagtgctaattgaaacgttgccagcatctaagccataacccttcatttcagctattttatcagtaattttttgaattatcttctttttatcagcatttttatactcaaaatatgctgttaattctaaatcctcaggtaggttttcaatatcatctagttcaactaaactactatcatgtttttgaccctctaaaacaaagtcgctacgcttacgactttcaattccctgtgcatccagttcatcttgcatgaagaaacttaatccatcttctaattcataactacattcaacttttattgctaataatttcactaatcttgtcccccttttgacatgttaaattctcacgtttatgatattaaaaggtgagaaaaatgtcgaaaaaaaataaaaagaaaaaacttaataaaactttgattgagaagatgctcgaccaacaaaagattccatataaacaattacaattcgccacagttcaaaaaggcgatgttaaacaaatggatacttccattttagacgatgaagaggctttggtctacaaaaccttggtatgtgagggaaataaaaatagtcctgtagttggagttgttcctgttaccgagcacttaagtatgaaaaaacttgctaaagcttctggtaacaaaaaatgtgaattacttccacttaagaagttagtcgcaactactggttatgttcatggggccaacactccaattggaatttaccaaaagcatcattttcctatttatttagatagcagcatgaaagaacacgatcacattgctgtttcaagtggagaagtcggtagaagtatcatgatcaatcctgatgatttacaaaaagtcactaatgccactttcgttgatttattagagtaataagattaagtaaaaagcttctcatgactagaaaaataattctagttttgagaagcttttttagctactttttaacgatttttacccatctaaacacaccgtaaattattaatagtacccaactaaggattgaaatatagagtaaaattgtaaaccaaattggggtcttgaatgaaagaattgctgtattctttcctttcttttgcttgcactatcggcattccaatttcattacacttaggcgatacctttttaccatttactattagtactgattgtctgtagaaaacaattggtaaagtagaatctttcccatcactagtccaacttatctttaatttaccattacttgcagcttctttttcaaaaccctctccattattaaaaataagtgttccagaaacccagccacttaccttccaagaattcatttgcttttttagtggtagataatctggattgccaggaggattactatcaataaatttacttaaatcatggtatctaaattgattaacacgttcaacattagtttttactttattaaatttaataatatttcctcgtaaatctgctctcagagaaaataaacatacgaaaattagtaaacactctacaaatactttaaactgaaaatcataacgattgattagatttacgacggtaagccccatacttagaaatagtagcggataagctactgctgtaaatctattaggaaactggaagtagtttgaaaatgatggaaaatacttttctactactctccatgggaataaatctgaacttataaataaaaaagcaagtccctcaatagttaaaaatgtgtttaatttagatacacgataattaaatgcaacataaactgtttgtaaaccaaataagagtagaactgcttcctgaatttcagtccacattgttattgtgccgtttgatttaaggtgtaggactgttagcgccggtgaaaaatctaatggcgctgacattgtattttttggatatagtactaaaaatgcaccccatacatttgcagttaaaatcaaacatagaactaccgcttttaaagtatctacccacattctttttttgttttttgtagttaccaaaccataaacaaaaagtgggattaaagccaaaattgcctgtaaggtacttaataaatggacttgggcaacaattgccatcataattgcaagacttatccaattaaaatgttttttatcatcgttaaataaatttattccttgaattaaaacatagggcattaaggccgctccccatgcattaaaactatttgatgggatccaataacttatatatccgcaaagtaaaaacagcgtactcacaattaaagcaactgttcgtgataattttacttttctggcgagaatatacatcccaaaaccggcaactataaaaattaaataaacaagtataatctgataattaaaccacgagcccgcacttaataacaaacttcccattaaataagcaaagaatggaccataaattgcattaactatccgccctgtttctcccatcccataattcatttgaaaataagaaaaattatggttttttatttgctgagcagtatcgtaaaatctactgaaatgaaaaatagtatctgatcccgtaagagcaacatgattaaataattgcggaatttgtagtatagtcgctagcaatatacttaaaattagtggcaaaccatactcaattaatttttccttgtatttattcataaattatattttatcctccaagtaatattttcaatccaacttttcaattgtatcatttattgtttttcctttttacacttgttaacaaataatagagtcaattaatctataaaaataaaagcttcttaaaactaaaatcacattagttctaagaagcttttttagctattttttaattatttttacccatctgaatacaccataaattattaatagtgcccaactaaggatggaaatatacagtaaagcagtgaaccaagttggagtcttgaaggaaagaattgctgtatttttcccttttcttgactgaacttgtggcatccctatttcattcacttttggttttattactttactatttaaacttaactcagattgtttataaataaaaatcggaagtgtagttactttagaagttgagtctttccaagtaagctctaaacgcccatttgaaagagccctttgctcaaaattatttttttgtggagacatactcattaacataccagtaatatcacttgatttgatcttctttatgactggtaaataatcaggactattaatttccactttattgatatatggagctaatcccttttccttcatctccttagcattgctagtaattcctttgttgtaagtaatattattattaatctcattaaagtcggctctaacattgaatagcactactacaattgctaatgcactcgcaatcattccaagttttttaccatgactcttaattaattcattcagtgttaaaccaattccaagaaatagcaaaggatatgctacgacagtaaacctgttgggaaattgtaaataaccagttactgctggtagagtgtccttcacaaattgccatggaaacaaattagaacttaaatatagaaagactatcccttctaaggtaacaaaagtatttaatttagaagacttaaagttaaagattacataaattagttgaacaataaataggagcaatgtgacttcagtgattgacgtccacattgttgaagtaccagcaacagataaattaacagcggtcaaaactggtgagtaatcgatcggagatgccatttgattagttggatagagcagtaaaaatgcaccccatacgtttgctgttaacacaatgaataagccaacagctttaaagacatcaatccatatctgacgcttattttcactcaaaactaatccgtaaataaagaaaggaatcaaggcaagaatggagaaaaaagtgcttaacaaatggatctgagctacaattgccattacaattccaagactaatccagctaaagcgctttttatggttattcaataggttaattccttgaattaatacgaatggtattaaaactgcaccccaagaattgaaagcattagatctaggccaatatgcaatatagccagtagttagaaatagtgccgtaactattgaagaaacaacttgcgataatttaacctttctacttaaatgatagattcccagaccaccaaccaaaaaaattagataggttataagaatttggaaacgaagccaagaactacaaaataaaagtaaacatcccattaaataagcaaagaatgggccatataaagcattgactattcgcccactctcacccattccataattcatttgaaagtaagagaagttatgattctgtatttgctggtaagtatcataaaaacgatgaaagtgaaaagcagtgtcatccaaagtaagaccagatcgagtagtcaattcagtccaaattaaaacagttgcaattactagactcaaaattataggaataagataatctattattttatttttatatttttctacactatgatttttcatttcttacctctgataagtattgtctcaaccgtttaattgtatcattcaaccaggcgaaaaaaatacttatttaccacttttattcttcaggaactgacatatttaccatatttcttcccttgcgataggcttgtttgatatcatcaatagttaaatctttacccttttgatcatatgcaactaagacttctctaacaccatcagcaaacttacttaataatctaaatatagtaatttctgcaaagaataaaactaacaataagaaaacagcagttgcagagatacgtgaaagtgcaaataagttatggaagaaaataatagataaaactaatgctaaaaaggatccacctaaaacagtccacctaaatttatttagtggtctagaaatatggtatagcaccatcatccctactgcgactaataacatcgtagccgttgtagctacttctggtcttcctaattctaaaaccatatctgccactaccaaaattgagaccgcaagcatatccgtaattccaccaggaattgcccttgacagtacattaggaataaattttccgcgaatacggttgtaattattttcaagagctaataagaatgatggtagaccaatagtaaatgctgaaattaaggctatttgagccggacgcaatggataagacattgcaaaggcaagagaaaagatagccattaaaaatgaaaagatattctttaccaagaacaaactagctgatctttcaatgttattaactacttttctaccttcatctacaacttttggcattctagcaaaatcagaatctaataaaacaacttgggatgcttgaacagcagcactattgcctgatgccatagcaattgaacaatctgctgtcttcattgctaaaatgtcgttaacaccatctccggtcatggcaacagtattaccatttttttgaagagccttaattaactttttcttttgatcaggcttaacacgtccaaaaacattatattttttaacaacttcttcatagtcgccttcactgatttcggttgcatcaattaacttatctgcatcccgaataccggcctgctttgcaacgcgtgctaccgttaaagggttatctccagagatcaccttgatatttaccccttgacgatcaaaatattcaaaagtactttttgcttctttacggattggattagaaattaaaatatatcctaatagctcaacatgctctactaatttttccttttcatcccttagtgcatgcggatattttccaaaaactaaaacacgatatccttgtcgggtatattgatttatttctttttcataatttttaaattgatctcgcaatacaaattcaggcgcacccattaataaagtgttgttcttaataactgccccactatatttatttaccgaagtaaaagggatgatttgcgtagcctgaatattaaatttctgattaaatgcttttgcgacagctttgatagttgcattatcgtgaggcatattttgggcaaaaatagaaatttctttgctcaactcttctttagtaacactaactggaataacttcctctacttccattttaggttcagtaattgttccagtcttatcaacacatagcacattaacccgagctaatgtttcaacacttttcatatcatgaagcataacttgggaacgtgctaaacgcatagctgctaaggctaaagcaattgtagttaataaataaagaccctcaggaatcattccaataattgctgcttccattgagacaatactgtccgctagatttaaatgatttacataacgagcaacaatgaagagggcaattccacaggggatgatgatgattccaacccatttaatcaatcgattaattgagcgcaccatttcagagccctcttttgaattcatcgctttagcttctaaagttagcttagaaacataagaatttttgccaaccttttcaaggcgggcatatgcctttcctgcaactacgaagcttccggacattaattctgaaccaacatctttctctatttcatcagcttcaccagttagcaatgcttcatttactcgtaaagttccagaaataacttgcccatcagcaggaatttgatctcctgttttaagtacaattacatcccctaaaaccagatcttcgattggcacaattttttcttctttatcacgaattacggctatttttgttgtattcataacatttaacttgtctaaaacactttttgcacgtaattcttggacaatcccaattatcatatttgcgataataactggtaaaaatgttaaatccttgtattctccaacgatcactaacaagatcgctaatattaaaaatatcaagttaaaatacgtaaatgtattttctttaattatttgccaggtagtcttagcttgatcattaacagctcggttaacttttccctctttaattctttgctcaacttctgcttgtgttaagccaattggttgtttaaagttttccttcatttgcatccttaaaaaattaatctatctgtaaattatcgtctttttcaatcgttacctcaccagctacatcagtattaaaaaaatcagaaatctggtgaacatcccagttttggcctaatccccacatcagtttagtaatcgcactctctgaagtcatatcacgagcactaattgctccttcaagcagcgcttctctcccaacttcatattttgtaagatcacttcgctcatataagcattgactcgtcgcaataatcggtattcctcttctaatcaactttccaattgcagctaccatatttctgcggatgtaattcatcccgcctaaaccatacgcttcaattacaattccttgacatccgctttcgaccattgcaaatagcaaattaggatcaaaacccgggaatagtttaactaaagaaacatgaggattaatgctagtgtttaaagttgtatctttcatatcttttgtatttttaggtacattttggtcagaaaatactaggccatcagatgttacccgagccactggtggtacattaacactttcaaaagcatcaaaattgatcgttcttactttaacacttctgcaccccagcataacttttcgatcaaaggctaaataaatattaggatgacaactagcagctgccgcaaaagctaattttaaattatccggtgcatcactcaatacaacattaattggaacctggcttccagttagaacaaccggaatattaatattttgtaacataaaagaaagcatggatgctgtataggccatggtatcagtaccatgagatactacaatcccatcatacttatttcgattttcataaattttttcagcaatcaatttccattcttcaggctgaatattagatgaatcaagttggagaatatcttcgacagtaatatcataaggtaattcccctaacatattaattaactgctcaccagattctttaggcactaacccagcttctgaaacaactgacgcaattgttccacccgttgaaagcaataatattttcttttgcatttttcactcactctttaattctcttgttctattaattatacgaaaaaagttgtcatagtttaaattccatgacaactttttaataaaaatctatccggcatgccgccagtctttatccattaaaatccgagctgcaattaagcctaatggtaaacaaattacaatcattaaagcttgaaccatccataaggcgcctgcatttaatgacgttaatcctaagttaaacatagctcggtacatatatagtcccggcaccataattacaattgatggcaccgtaatagcaattcttgggaaaccagttttacgtctaataattgaagctaacattcctgcaacaaaggctccaataaaagcagccacagctggtggaacatttgaccaatcaactaaactcaagcgtaaagtatttgctatagctccggaaatccctgcaacagttgccattggaattctagaattaaacataattgagaagccaaaaactccgcagaaactagcaactaatcttaaaatagttaaaactaatggtgttagtcctaatttctcaaagttttgcggatgcaggtttaagatcaaagccattacccaaccaactgcagttgcaacaacaataatcatgattgcataagccattctctctaagcctgatctcatatcaagcttagaaatatctagtccagacgtaataaatggaaaacccggaattacaaagagcattgctccaatatatccatccaaatgtcgcagacggactggataaaataatctaattaagtaaaaactccctacatataccgcacaagctacggcaactgcaacggtaatattcgctaaaatagttagatgacgatcaatcatttttcggcgaacgtaatttccgcaccctgcacctaaaaatgcacaaataacttcaaaaattcctccgcctagtaaaaaaataaatcctgcacatgcaagaccagaagctaaaccaacttgccatggagaatattgcgatttcattgtcgaaatttcttctaatcgattatgaatttggccaattgtccaatttccgttatcttttttaaactgactgacgaaattttccatacggtctaatttagttgtattaactcctgtggatggtaaacttagcgcctgcgtataactcttaccatctgcatcaacacaagtatattcaattgaaacaagtccaatatccgtgctgcatgtcatatctaaacagcgagcaattgtattcatcgctgatcttacacgccacgctccggtcccacaagagagaagcatcatcccaatatgccctacaattaccgatcgttcagccaaagtcgcatttttagcaggtgtaatattatcactagtaaaaaactcctgccaccgaattcgcatatgatgatgatgcgacaaagtatgttgatgatggagctgatttacacgttcatttttactttctttactattcactttcatagtccccaaactttgattaaatatcatacctttaaaattttatcacacaaaaagcgtcttgcactctcaacttaagtacaagacgcttttaattattaaaattattgtttaaaggtcaattccgtcaacaacttccttcatcttagctgctgaataagccattttcttattttcatcttctgataagtgaagctcaatcacgtcactaattccattagcagtaactacagctgggcttcctatgtaaagatcatgaataccatattctccagtcattggcgcagatagtggcatcactagagccttattttctaagattgccttacagatttgtgttaagcacattgcaacgccataaaaagttgctcccttattagcaatgatcttaccaccctttttacgaacatcagtctctaattcaaccaatgtttcttcatctaattctttataagaacgaagaggcttatgatcaataattgcttcatcaaaattttcaaaagatgtatcaccatgttcacctaaaacataagcatcaatatgatcaacattaacaccagtcttatgtgataaagccacacgcaagcgagctgtatcaagggatgtaccggttccgataactttattcttaggaaaaccagataacttttgagttaaagtagttagaatatctactggattagcagaaacgacaaaaataccgttaaaaccagattctacaattggttttatgattgattctaaaattttaacattagtttttaccaaatctagtctagtcattccaggttttcttgcggctccggcagtaattacagcaatatcggcatcttttgcatcactataatctccactcttaacagtgcattgaccaacaaatggggctaaatcttctaaatctaaagcatccccttcagtaatttttttgactacatcacaaattaccaattcatcaattctaacattttgcaataagtcatttgcaaaagttgaaccaacacggccgtcaccaactaaaaatacttttctacgactcatttttatatatactcctttaaatgaaagcttaagttctacactttaagtatacacaaatagcctttctattgaaagcgctttatttaattaaatctgccattgcttttccagcttcacgaccaaaaataattgtttcagcaatcgaattaccaccaattcgattgttaccgtgtaagccaccactaacttcacccgcagcatataaaccagaaataaagtttccgttagtatcatagacacgggtatcaggtgcaacatgaattccgcccattgtgtaatgaatagcaggtgcaatatgaattgcataatatggtgcatggtctaactcagccattccggtagttcgaccaaattttgtatcatcattatttgctactgctttattccaattttcaagtgtttcttcaaggttggaaatgggcactttaatgttttcagctaattcttcaatagtgtttccatgaacaactaaattaattgaatcataaaattcaattgccttaaccctatctctaactccttggtcaaagatcaaatatgcagaatgttctggagtttgggtaatcgcatttgatacgatctttcgcgtattcaattcattaacaaatctcttaccttgatgatcaactaaaatagctccttcaccgcgtactgcttcaccaattaaatacgcatgatctgtatcttgttgaactgtagggtgaacttgaactaactctaattgctcaagttgtgctcccactttattagctaattttaagccgtctccagtcgcaccaggttgattagttgtcttatagttacgcaaatctggtcgatacttagcgattaaatctttagaagcaccaaaaccaccagtagcaagtaaaactgctttagcttttacttgccgatcattattaacttctactccattaattttcttgttgtcatcttgtaataatttagtcaccttagcatcagtaaaaattggaatattcttttcatcagcaattttaagtaaattattaactaaaaatgcgccaattggtgccattgaagatggacggtgtgtacgttttttggacataccacctgtaattgttaaatcatctactttaattcctaagtcttcaagccacgcaatagccaaaggtgcatgctcgacaaaataatgtagcatttcacggtcattcatgtagccgccaccttttagcgtctcatcataaaatttttgcatactatcgtttacacctaaacgagcttgaacaatactttcagcagcattcataccagaactagctctcatagtgtttccacctaaaaagccattcttttctaaaattacaacattcaaaccatattgctgtgcttgaatagctgcggctaatcctgtaccaccgcttccgacaataattgcatcatattttttttgtaacttatctactgtttgtgttggaaatttatatcccattcttattccttcttctaatcatcaattggcttagtattcattgcattagtcatggtaattggtttcatccacttatcatattgttctttagtaactaagccgctctttaaagccgctgtacgcaaagtcgtattatttttagctgcagtctgtgcaatagtagcagcttcatggtaaccaatatgtggtgaaagtgcagtaactgtcattaatgaatttgctacatccttagccattctttctttattaacagtcataccatgaatcatcttatctgcaaagccagaaatagttccagataaaacattggcagactctaaaaatgctgcaatcatcactggcttaaagacattcatttcaaagtttccttgagatgcagccatagtaatagttgtatcatttccaaagactctcaaacatgccatggtaacagcttctgcttgagtcggatttactttacctggcataattgatgaaccaggttcgtttgcaggtaaattaagttctcctaaaccagctcttgggccagatcctaagaaacgaatatcttgagcaattttgaacatatcagctgccaaagcttttaaagcgccatgcacaacatttaagcctgagtgatttgctaaaccaaagaatttatttgtatcaactttaaaattatgtccatactttcttgataaacgctcagcgatatcttctgccataccaggagctgcattaagtccagtgccaaccgcagttcctccaattggtaattcataaagtgtttcttctaactcgttaatgtaggataaatcatgattaagagcagaaatatagcctgatagttcctgaccaaaagtcaatggaaccgcatcttgcaagtgggttcttcctactttaaccgttgtccaatactcatcttgtttcacttttagttctttaatcaagtgtttaatagaaggttttaagtcatctaacgcttgtgttgcaactaaattcattgcagttggaaaagtatcatttgatgattgtcccatgttcacatcatcattaggtaaaatatctaaaccgggatgatttttattagcaagattagccaccacttcattaacattcatattagtttgggtacctgatccagtttgatagacatgcaatggaaaatatggttgcaattcttcattgtttaaatcaagtagttgatgaattgcttcaataatggcacgtcctttttcttctgtttcagttcctgcttcaatattagcttgagcagcagctagctttatttgaagaagcgcacgaataataccaattggcattaacgctccagtatggaaattatccttacttctttgtgtttgtggaccccacaatgcctttttaggaatttctactgggcctaatgtatcactttcaacacgataaccttttttcaccatatttttgtcctccgttttcattatcttcattataagctacatttaaatgaaagggcatacaaaaagcggagaatataattcttcgctaatataattgtattaaattatactaaaaatactttttcaatgctatacgcttatcgttcttgatgattcaacttcttagcaactaggtctccaacaacttgaacaatcaataccaataataaaactaataaagttgctaccaaagtcacatcattattaaatctattgtatccatatgaaatggctgtattacctaagccaccagcaccaacagctcctgccattgcagttaacccaattaaactaatcaaagttacggttgaaactcgagctaattcagagcgactttctcttaaatatacgtcaaaaataatatctttggttgaagcacctaatgcttctgcagcttcaatctttcctttatctacactttcaagtgcaacttgaacttgtctagcaaaaaatgggaacacacctaaagttaatggtactaaagctgctttcatcccaatttgagttccaacaattttttgggtgactggagcaacaaaggctagcaaaataataaatggtacagctctaaaaatcgatacgattttatcaacaatccaataaactactttattagctaaaattccttttggttttgttaaaactaataataagccaaaaattaagcctagaattcccccaaaaacagctgaccaaaaagtcataaataaggtttggaaaatagctgttccccaaccagcatctccgccccaacctagggctactacattaggaaagtttttagtgaaaaaactaatcattagtcagcactcctttatctaacttcgttacaacaacatttttactctccaagaatttaatagcttctttttgctttaattcatttaaatttaataaaattgcaagtgttcctattggttcaccacttagaacttctacatttccatataaaatacttgcttttgtattcagcgaaacatctaaatcagccacaactgatttagttacatcattgatgctataaactaattgatacaattctgcgttctcggctaatttatcaaagttataagtattcaaaatatgttgagcctgcaaagccccacccacaaattgacgcgtaagttgcttttgaggatgtaagaagacctctctcaactcacctttttcgattacttttcccttttccattactacaattttatttgctacacgttttacagcatccatttcatgggtaattaaaacaacagttaggcctaattttttatttagatcatataataaatctaagatttgattagtagtttttggatcaagggcactcgttgcctcatcagaaatcaaaatatcaggatcattggccagggcacgggcaatagcaacacgctgttgctggcctccagataactgagccggataaaaatctgctttatcctttaagccaactaattctagtaaatggagagattttttctctaattcctggtcagataaacgactatgctgcaatgcaaaagcaacattttcaataacagtttcttcattcaataggttgaaattttgaaaaatcatcccaattttccgtcttttttcttgaagttgcttcttgcttatttgtaatttattgtctttaaacaacaccgttccattaacctctactgatccagcagaaggatattgaagtaagttgattgttcttactaaagtggattttccggctccagaaaatccaattacaccgtaaatatcacccttatttatttctaaacttacatcgttaactgctttattttgtccaaattgaacggtaatatttttcaaatcaatttgtgctgccattagactgctccccctcttactttaatttcaatccccaagctgcaacttcagtcttgccataaagcttgtcagataatttcttagttttttcagtttgatatgccttaactaaatccttgtaaattttgttattcctatcttttttatttgcaacaattatgttaatccattgttcagaatctttattcaaaggctcaatataaattgtttgcttatcgcctaatttagcaggaacggcataagtattattaacaatacttgcatctacatcatcaattactcttgctgtttgttctgcactaacttccttaatttttagtcccttaggatttgaagtaatatcagctaccgttgcaagtttaacgccctttttcaagttaattagtccagcatttttcaagacatataaagctcttgattcattagacgcatcatttggcactgcaattgtagcaccttgtggcaaatccttaatgctcttatatttctttgaatacaacctgattggagcaatataagtattcccaattgcgactagtgaaccatgatttgccttattccatgcatttaaaaatgtatagtgctggaaagcatttagatcaatatcaccattttgaagtgccttatttggttgattatagtcagtaaaattcttaattttaatttttatgccatactcttcttcagcagtttctgctacacttttccaaatttcagcgtcttgctttgtttgaccaactacacccactactacttctttttgattcttggcagtgttactggttggaccaaaactaaaccatccagcaattacaattaaaactgccactagtgaccaaattattctatttctaattctctttttatgcattgtactttcctccaaacaaaaaagcactcatccataaaaggacgagtgctcgcgttaccacctttaatttgccatttactcacataaatgaccttagtaagtagctcctaattttcattaagaattaccttgcgtttttaacgatcgcaactccgttgataacttattattaaaattcgttaccaccattttaatctctagtccatcttcaattagctgttttatctacttccaccacacgtagactctctaaaaaaacattaccaatttactcaactagcaaaatgtttaagttaattgttaaaaatatattataatcttaatcaaatttcgtcaagtctttttttaattttttattttcttatcgaaatcattatattattctgatacatgaggatatttaagaatggagaaagaatgatgaaaaataatattgtcaaaataataatgtggatcctcttttggttttatctaattccatattatttactaaaaaaatttgtttttaagaaaaacaaacatcaagttttttgggcaaattgtgtaacaatcgctttattagttttactaagtctagcgctcagcccaagcagtacaaccactacttcaattaatgagaacgcctcagccaaaagcagcagagtagttcataaaacggtcattaaaaaagttggaactaaagaacttaataaagaaaaagctagagctaaggttctcaaacaagaacaaaagaataaacaagctgaatatgacaagttaaagcagcaacttgatgactaccaagaaaaagaagaacaacaaaaacaagaagctgaacaagcaagaaaaaaggttgaagcggcagctaaaaaagaggccaaagcccgtcaaaaagaagctgaagaacaacaaaaagctgctcaacgtcaggaagcaaatactagtagttcttctaattcttctgattcttctaatcaaggtgatctttatactggtaaccaaggaacaattgtcggaaacagtaattcaaaaatctaccatgtacctggtcaagcaggctaccatatgaattcagctaatgccgtttactttaacagtgaacaagacgcaattaatgctggttatagaaaggccaaaagataatgaaacataagaaaattaccgaatttttaacagttacccttttgttttctctcggacttagtcaaacatatactgttcaagctagttcatctaacgatactaaagtcgctaaaaaatataagtatgactatactgatcaaaagaaagcaaaaaatttaaaaaagaagaacaaaaaaattgagaagaaaattaactctttggataaaaagatagctgatcttcaaaagcaattaaaaaactacactaatccaaatgcagttgaatctttaagtaaacaaaaattagctagtcttgattatacggggaaaactgttgttaatgtgaacaataataatccagatttttcaaagcaagatttagatacgaatcatggcgcctggcaaaaatatggcgatcttgattcacaaaatcgcgtaactgcagcaaatgcacttttaaatagttccttaatgccaaaaacaaaacgagagccactacatgtcaatccaactggctggcataataagaaaataaatgaccattggctctataatcgttctcatttaattggttatcaactcacaggtcaaaataataattggaaaaatttaatgactgggactagacacttaaatgaccccgatatgttaatgtatgaaaacgaggtggccacttatctaaaagcctccccatcaaattatgttcgttatcgtgttacgcccatttttagaaataatgagttattagctcgtggtgtcgaaatggaaggtcagtcaattaattcaaatgacgttcatttccatgtttatatatttaatgttcaagatggcgtaaacttaaattactcaaatggaaccaataaagcttcttaagttttaataaaataactatattaaagttatttttttgatatacttctattcgcttctcttaatttcctaagttcaaacctatacttttctttcataatacttattcaattagtatttatgcttaatggtttaggtgtatgaatatactaaatgaagaaagataatattataaattcttcatttaattacagtttaactttattctaaaaagcgcaggcagaaatctgtgtgaaaggaattgtgattgaagtgatagacaacttaggagctgcgatcaaaaaaaggcgcaggagtttgagaatgactcaagaagaccttgcggaattcagtagtctatcagtgaatttcatctctaagattgaaagaacaggtaatcaaaatatcagtattcaaaaattagatgcgattgcaaaggcactacaaacatccgtaattactttaattgatgaatcatccaaaactcctgaaccacaggcatttgcaagtaagttaagcaatgaccgtgtttttcttgacaagcttacaaatgacatgaaaaaacttcctgttgaacaggaagaagctttagctaaaagttttattactataattaatacttttgctaaagaagataaataaaaactttgccagatatcttctatctggcaaagtttttttattttatagtctaattttgataattaattgtttgcttttcaatcaacttgtaatctgttaactcatcaccatttaagttttctttatttaattcaatggcgttaatttgattattttcataattggtataataaaacgtgcctgtctccaagttagttccatcagagtaaattgtgtactcataagaatttggtccgacttcatctgttccctttggctgttcaaccgaatgtaaaatatggaaataatttgttacactacttaattcattatttccttgaggggaatgtgcccgaacaaaagctattttcacaaaacgactggccgaatccattcctcctggcaaaaaatgagtccctaacccgcgactatataaattaaggtcaacacctggaacaagagtatttttaggctgtgcaggtgctatattactataattagctaagttacgtaactggcctggaaattcaggattattggttaaaacatgaactggattatcataaacgtgtaatccacttaaagtcgattctacaacgatcgactcaccagtcttatcagccattaaccagtgaagtggagaaagtggtagtttttctgaaaagtttatatttactaagctaacatctttcaatgcatcttttacttcagcaaccgtagtacattgacttagcaaataaggaattaattcaaatggtgtaacattatttttctccgcattttctggaaaataatgacacggaccatcaaaattaaggccagcaattcctagcccttcttcatttgctgcatcaaaatatagtggataattattttctacaatcgccatcccaaccatggcatattttgcctttttacttggtaatttacgatattgaaactcataattccttggtgtaattacaggatgttcaccaaaagaaatttccaagtctagatttcggccaaaataatgatgattatttgaactataaacaattgaggtacacatataaactcctccttatatcttttacagtccctatattactctttttttcaaaaataaaaaggaaacttctcctatgaagtttccttattttattattagtatatttttcgaacgtgatcttgaatagttgggttatctaaaaattcatcatagctagtatctgcacgactaacaattcctttagggccgacctcaataatatgatctgcgatagtttgaataaattcatgatcgtgagatgtaaataagattgaaccttggtagtccttcaaagcatcgttaagagaagtaattgattctaaatccaaatggttagtaggatcatccattaccaaaacattagctggttcaagcatcattcttgaaagctggcagcgaaccttttctcccccagaaagcaccttaatcttcttgtcgatctcttcaccagaaaagagcattcgacctaaaaagccacgtaaaaaagtattatcatcttgttccttagtagcatattggcgaagccaatctaaaatcgttaattcatcattgttaaagttcgcattcaaatcacgtgacatatagttataggcagtagtttgaccccaagttacggtaccactttctggcttaattttaccagcaataatatccatcaaagcagtggttgccaaagtattacgtgataaaaatgcaactttatcaccaggacgcactataaatgaaacatggtctaaaatcttttcaccatcaacactataagatacatcttctacttttagtaaatcgttccctaggtcacggtgcatttcaaattttacataaggatatttacgagaagatggtctaatatcatcaagggtaattttttctaattgtttctttctcgaagtggcttgttttgatttagacgcatttgctgagaaacgagcaataaattcttgaagttcttttattttttcttcttttttagcattttggttagctgctaattcacttgcaagcttacttgattcataccagaaatcgtaattacccatgtataattgaattttgccataatcaacatcacacatttgtgtacatacttgatttaagaagtgacgggtcgtgggaaactacaataacaatatttggataatcggctaaaaagtcttcaagccagtttacagtatgaacatctaaaccgttagtgggctcatcaattaaaagaatatcaggattaccaaataaggcttgtgctaataatactttaactttttccgcttctggtaattcactcatcttactttgatgcaactcttctggtatacctaaagactgcaaaagcttagatgcgtctgcttcggcgttccaaccgtcaagttcagcaaatttagattctaattctgcagccttaactccatcttcatcgctaaaatcagccttagaataaagctcatccttatctttcattacttgataaagttctttatgcccctgaattactgtatctaaaacagtaaattcttcgaaagcaaagtgatcttgattcaagctcgacattctttcattagcatcaatagaaatattaccagtagtaggttcaatcttaccttctaacagtttcaaaaaagttgacttaccggcaccattagcaccgattactccataacaattaccgggagtgaatttcaagttaacatcttcgtataaggtacgaccagataaatttaaacttaaatctgagacagtaatcaaattattttcctctcttacatctaattttttagttataacacattatagaaagtctttttatgaaaatttaatgcaaactggtaatgaatgtagctaatccaaataaaatccccggaaagttagctacaaacaacggccaatcctttttctctcttaagagagcatacagaacccaaataaggcagttaatggctgcgactaatggctgaataggattgccgtaatttccttgcaaattattcataatttgtggaatataagaaacatacattagaacagataaaactgagccaattcgtccaatcgttaatacagtcttattatcaaaagatctaattttctttttcaactaatcttcctttctatactatgttatctagtttacttactttttatagttatctcaagcacaaaaaaagagattgatcaaaaatcaatctctttttttaatatcaacttatattaatctaagtcaacgttgtctgggaagaatgctaaacgttcacccttaccaagttcttcttcgatttcaagtaaacggttgtacttttcaacacgttctgaacgagctggagcaccagtcttcaattgaccaccgttaacagcaactgcgaagtcagcgatgaaagtatcaccagtttcacctgaacggtgagaaatcatagtgttgtaaccattcttacgtgaaagacgaatagtttcaagagtttcagtaacagtaccgatttggttcaacttgattaatgaagcgttaccagcaccttcgtgaatagccttgttcaaaagcttagggttagtacaaatgaagtcgtcaagaacgatttggatacggtccttgtggctttgagtaaacttaaccataccttcaacatcgttttcatcgtatgggtcttccatagaaattaattctgggaattcgtcaagtaacttgtcgtagtagtctgccaattcttcgtcagtaagaactttaccttcaaggtggtacttgccgtcttctttgttgtagaagtatgaagcagcacagtcacatgcaatagcaatatcttcacctggcttgtaaccagccttgatgattgattcatgtaatgccttcaaagcttcttctgagttcttcatgttaggagcgaaaccaccttcgtcacctaagccagtttcgtaacccatatcttcaagaactttcttcaaagtgtggtatacgttaacaatcttttcaaaaccatcacggaatgaagtcttagcaactggggtaatcatgaattcttgaatatcgataccgttgtctgcgtgttcaccaccgttaataacgttgtggaaagtttgaggcatttcaaggtcagtaccaccaaggtaacggtataatggttggtggttatccttagcagctgcagcagcagtagccatagatacacctaagatagcgttagcaccaagacggcccttgtttggagtaccatctaaagcaatcatagttgcgtcgatgtttggttgatcatgtggatctaatccctttaaagcgtcgttgatttcagtgttaacgttgttaacagcgttcataacacctttaccaccaagacgtgaaccaccatcacgtaattcaacagcttcgttttcaccagttgaagcaccagatggaacttcagccttacctacaacaccgtttgaaagagtaacgaaaacttcaacagttgggttaccacgtgaatcaaagatttcaagtgcatgtacattctcaataactgatttgagcattaaaaaaatcctccttaaatttgtggcgaaaaatacaaactaaccgaattggcatctagtcagtgtttttcgtcgcttttaggcatagcccttttgactacagatttattttaaagcaactttgtgagtatgtaaactaaagaaagcaattatttttttataaaaaaagatcgaccattaaaaggccaatcctaaaagttgctgtgcaattgtaaaacaaaatagggctaaagttgttgctcctaaaacatcagatggatagtgtgcacgcatatttaaacgtgacactactaccagtccccatacgattatcaaagtaattaagagccagattcccataatatgaccaaagatttgccataacattaatgacataatagttgcgcttaatacatgtccactaggaaagctatagccatctcgataggttctcattgacaagggtctttttcttttaactgaatgcttcaaaaagattccaactgcatcagttactgctaaagtacctaaagaccaaagagcaagccaagggtgatgaaacaaaactaaaagtcctgctaataaaaagtcccaaacaacaattaccttaggctcatttaagactgtaataactttccaaattttaccgtctctatttttaacaagtttatggtgcaataaatgatcataaaaattaaatagacgagaatttctaatgttaaatattaatcctaaaagaatcaatgccgaaatcagcaattgaattaaacaatgcaatttcacttttacttaacctcaattaattgtgctaataaatattgtaacagcaaaaaaataaagcacatacgtttttaaattttatttaactatttcaataaaaaataagaataagatttcatcccgagcaaatatttagcgatcaaagtgtataaaaaagcccgtaagattactacttacggaccaaatttaaaggagagtacaggtttcagtgtttgattacttatgtttacataacacacttgaaacattgatttatcagtattcattgctttataactttataattcagtgattctttttagccatttttagccaaaaaataagccgttctcctgtagtccaccctcaacgcttagaaggttgcactaagcgattaaaaaagcattaccttttgtgacgatcaggtagtgctttttgagtgcattgaattcaaacttccttacttagttgcaaataaattataacattttgcaagtaaatttgtaataaaaaaacatagttaaaataataggaaatttattgtatgcaaaaaagccactccagagaattaactccagagtggcttttaaaatgcattttaattcgtttcttaaattgacaatagacatagaaacttcaaagatatctatccaaaggactaaatccccagtaattaaattatatcactttatattacttaaaagttccccaagcatcgttgcctacacgaccaactaaataaccatagtgattacttccacgcggttgttgtagccaaactctgcctgcactatctctagcccaagcgttgtatttaactactgaccctgctggcaatgtggtaattaacatgctttccgtgctagcaccccagcgtaagttaattgcgccaccagtaatgaatgtgccgtgttcttcatgccaagtcataccttgtacatcagtccaagtcgtaccagttgggttagcaggagttgggtttgatggttgtggtttaagagatggtgcatcagacttaagatcaattaaagtgatattagcatcaacatctaagtcgtaccaattgctactaaattgccaaattgcaatattatccattgatggaaaataaccaaaatctgctgtatcttgacgattcatagtcttatatgatgcaacccataaacaagtcccatacttagcagtgatcttcttaacatttatgttattagttaataaggattttccagaatataacagtggcttatatcctgctgcaacaatcacatcaagaaaagctaatacagcattagcactagcttcatagccttgattagttacattaccactaccagtttcccagtcgcaagttaggtatgaaccctttggcaatccaactgctacagcagagttaacggcataatgaccttcttgtactgctacgccaccattggcgctaaaacgtgcatagtgatatccactaaccatcattccattatctttagcactattaatttgagcctctgctttaggattgcgataatctagtccttcagatactttcacaaacgcatatttagcaccaagattagcatatttagctaaatctgttccttgaaaacttgaaacatcaacgccataacttctttttgctacttgcatctacttacctcctacttctttacttctcttaattctccaaccacagtaggtttaggcttatctactgtatctgcaattgattgtgcttgcttcatagcagtgaccgacttttcaaccatacctttgacaaagctcatagttgggtgtggcaagtgtgccatatctaagagcagaaacaagccttgaacgacaaaagttagcttatcttctccgtcccctcccctcttttctgcttggtagacaaggggacttacagactgggcaacaatcttttcagccttagccaaaagatcaccttgtgctgctttcttgtcgattgcaattttgtgtttagcatacacagaagcaacaacgactgctgcaactgatacgactacgatggatagatctaataattggttgacactcattattttgcctcctttaaatctttaatacgtaacttcaaagccttggcatacttacccattgcttgcttttgctcgattagtaaagcacgttggttaacagataaagttttcttgttttgttttgacaaaaattttgacaacttaccgcgctttgcatttagcttatttaactctttttctagttttttaatcacgttttttactctttccatcaaaaaaggcaccattagttggtgtcttctttacatattcatctactaaaatctgttgttgatcaaccttacgttgcaatttcagatttttttcttttagtctatctatctctttctcttgttcttggcatttttcttggtagtggtcacgctcttctttgagagcatcgaatacccacttccaaaccgcaatcaagaacgtacctataccaccaagataaggcagtgcccttagtaaatcgcctataaagcaccacccctatctaataattatgcttcttacttttgctaatgatagaaaaatcaaaaagtaaaataataacttctagaaaaccggctgtaaacatatgtggatgtccggatatataaccgtggcagaattcagcaattgcttcaaatgctaacaagcctgcagtaataattaataaattgcgattagtagaaatactatttttattgctgattgcccaactaaaaagccaaacaccaatagcaatgaagataccacctactaagtcgtcatttaagacctcaaccgcaaaaggtggccagaaaaagtagaagtcattgcagataagaattagccctatacccatcattgcaaaagccagtatttcatgttgtgggtgttcagaatgtaggagcttttttagcttaagtttcatcttacaccttctcatttataaatttgccaattctgtctgctaaaagaatgtgtccagctctagttggatgtagagaatctgtcatgtacttatctttgaaatctttgttgaatgggtaaaacattgaggagtatagatctagaacaggaacagcatacttagatgcacttttcttaattgcatctacataatctttgagatacaatccttccacattttttccgcttgtatcatctacaccattggctggtctagtagtccaatctgtttgtaatggtgtgacgagtataatagttgctccaacatattgagatctcaaattagtcaaaagtgtatttaacgctccgtaaaaagtagtaatatctacactcttgtcgtcccctaattgtctcccgtatacccagtcattaactcctgcaaatatcacaatcacatctgcatcttgatccattcgagagtaagaacttattagcggctcaatattatcccattcaaatctatcaatagatttttgagatattgatgcacctgcaacaccatagttccttataagatctgctccagtaacagtctttaaatcacttacatatgattttgacgtattaattccttgactaatactatccccaagaacattaattttatgtccttttaatggttcaaaactattatatttaactccatctataaaaatagttggattaccatttagaacaatatgattaggataccaataagcaccaatatttccccaattaaaactgatattttcatctaagcttgatactattttttttacatcaaaatcatagtatagccatgctcctgattttattttttcaatattaataggattagaattaatttcttcggtagtgtgaccataagaaatgtataagttattaaagctcatagtattagctgcagtatctatttgtactgaacctaagccactaatcattggaattgtagtgcttggtgttatgttctcattagtaataacacctaaagttttaggattattatttatttttagttggagattggttttaatgttccacgaagatggctcgaatgaatcatacatcatacctacacttataagattactatcttcatttggtgcactaaatgtctgtaatttccaagttgcatcattgaaatagatccaagttcctctactatgacctagaccgactagagcaacttttttgttagaaataggcatcattctactgcgatatactacttggctttcctgtggtaggttcatataccactgttcatcatcgaaagtaatatttattgtcccttgaccaacaatcattccatctccaacttgcagagatacattttttgatggaatccaagttttaggaattacattattttgagggtaagcatcagctattttggatcctcgaacgatacaaaagtcccgttttttaaaagtatctgtatctcttaaagatacaggaattttaatcgcagtaatatcttgcggaattgttactgtgattaaagattcattggcatccccaccagatacataagtatcgtttttccaaaaagtgtaactgtaagttaattgattccaagtaatctgttcactcggactaaccccaatggatatttctccccagtcggagtttggaataaaagtcccatcagctttatgaaatccgcctagtctgatatttgatgataattccgagtataaattaggcgctttctcatcttggtatacgccttttaagttttcaatatctaccgtctctggagcaatgcctgcactttgataaattcctccatcttgccattggctgtcagtccagatagctctatgaccattagatgttacaactagttgttctgtcccattgggaaatttttcttttactgaatctaaattagcaagcatgatgggtgttgcagaaatttttgacaattgattttgaaccatatttttcatagattcattattttggttgaattcacctcgtttgatgatgtcgtttttgtcaatttgatcttgataattaatcaatcgatttccaataattctttcttcagctctaacttcttcaacctcggcattcttggcaattaaggcatcacgagtagcctgtgtctctttagtataagcatctctagcttctttgattacttgatctgttttgtcttcaatttgacggattagtttttcaactctatcactatagtacttctgagttaatccaaacatgacatcattgccaagtactctaaaccaaatgtcaattgaagttaatctgcgaccgttcccatccatcaagccaatttttccatagaaaatgcccttctgagtaaacatttgatcagtcagaatgtaatcagcccagccaccatctcgtgtattagcagcactaccttgccaatcacgataatcggcatcaggagccattacgatattgtcatcgtcgtcagtatgccactgaccaactgcaccctctataaaagggatcatgccatttacgttcatcacacgtccttggtcataccactgtactggcaaaattttgccattatcagccacacgcatcttaatgtagtcattaattgatgcacttgattgaccagccttagaaatatcggcttttaagaaatatggttctccatgattaacgcttgtcattgtcataatctatacttatcccctttgctttctttgcattattgatatcgttttgactatcaattgatatttcagtagccccatcgccaaagacggcaagattgagcttgtcaatctgtttattaatcgttccaatatctcgtttaacttctgccacttcattaggcaaaacttctaatgctgttactcgcttatccagattacttaaatcctgctcaagcttatccaccttttgagcttgtgtcatgcagtactcaagtccctgcgccatagcttcacggacatcaacgccaaactttttgtggcgtatagcgtccgcaatttgttgtggcgttaactgtttgccatctatgtggctgttgtcaaaataattagccatcactttctcccttctgttctaatttatccagcctttctccaaatgatttcagttgttcaactgtcgcatacttaattggtagttcttcatctaagaacttcttaaccttggcatagtctgttaagtgcttatctagctcatctttgattttttgagcattaaaatcgctctgttctgaaacatgttgaactttttgattagtctgattattgctactttcagcactcattgcaccagatgaaaggttagcaatggtcaaagattgctgggctaaagttttttgaatagattgaaaacgagcattaattttcttaccgtcctcaatttgatagtcagttaaactcttagcaacatcagcgatctttaagctactatttctttcgtgagcgaaatcaatatctttttcgactacttgaagtaattgggctgttttggatacctgagggttgatgaactgatatgaatctccaactctaaaccgatcaaattcaggcaattctaatgctgaaacttcaaatgagttcttagtgacgtgctgtttttcattagcaagccatttttcgcccatttgtttgatttgagctgggtcttgcaagtcatcaaaaatcttcgttccttcgatcacgccaaactgccgtattaagtcagcatcttcaatgtaatctttgccaccattaacactagtgatgttaaatctaggctgtgggctttcatcttcgtaagtagtcgaggtactatctttatcgcccttctgaccgccctctttaattaacttcaaaggatctagccaagcccagttagggtcaaaagaatgaccttttgtgtaaccctcataccaagattttttcgtaaccccgatatggacgtgactagtatcacgtattccaattacatcgccagtcttaattgtttgtccttgactaactttgatgtttccacgacttgagaaagcttcttgatagacaatatcatagccgtctcgtgagtgagtaactacataccaacctatgtagccgtcagaaccaatacgagttactgtaccaccatgaattgcatgtacttcacttccagggtggtcaatactaccgaaatcaagcccatcatgaaaattattggttcttccattacctgcatgaacgccaaaaagttgtgcctccatgaagtgaccttcgccaacgctaggaaacggccaaccccatgtattatgtgatgttttatgaactgtagtagtacttacttctttaaggcgtggattaccgttaggtgaccacgaatgatagatctgccacttatcaacttctgattgccagtcgtccatattgaataagcataagagctgatcgaacccagctttccaagtagtaaacggtttaacacaataatgcttaaaagtttcttcaatgaattgcaatagccccgcacttgggtgaccagcagctgcattactgtctattgtgttaacaacagtttcagatccaccactttcgccttgtatcatgcgcttaatcttttcaacataatcatcagttatgtttacgcccataagcttagcagcatatctaatagcaggtccccaatcgccattaacagcatgggttgttcctgaaataggaacaccatgttcatcgagtgtatcatcgtttcctaaattaatcttaggcgatggttgaaccttaccaagcgggattaatcgagtgattatcccagtagggtcaatggtctgcttagccgataacatattcttacctacagaaataggagtatcagccttatgcgatactcctattgtttttgtgtagtcaatataatttgtctgtttatcgtggtcatatctaactcgaatataaccaccgcttttattaattagctgggctgtaattgcttctttagtagtcggataatcaatctgcctttgaacaataccttcgctgtctgaataatcacagttaccaagtgtaaagtgcttataagtatcattcaactgctcattatgcaccttaattagtttctgtaagtactgcttagcacttgacccagaatcattatcaaagcgttgaatgctatctaaaagataagcatcaatagcttcaaaaacgtattcacgagtaaatccaccatttgaagccatctctttgattggtttaatcgctcgtccacgaaagataagcgcatcatcttcatagacttcaacgtgagtaattaacggctctacattgtcatagagaggattgttctgattaacagtgatatcaagatcatcaatatctgttaatttaagatttaaacttccagatactaagttccttgttggaaggctctggtcatacactatatagccattcttatctgtcggcttgtcatatgctataatccgatatcccactacatcatctcctctcgtttgaattggaagtggattgtgccattgcctgaaacagtaagattagtcactccaactggtagcattacactaaccttagttgctgcaacttgatctaaatcaagattgatatttgagcctgtaactttcacctttcctgttactgcaaagcctagttctatcggcttagagccgtaattatcaaggtcagccttaacagaattgccatttacttcaaaagaagtttgctggcattcccaattgtcaaaattgatctcatcccagatatcactaccttcatagctcctagcaattgcataaggatatgctttgaacttaaccgtggctgttagagtaccgttactttcatcatcagaacactcaatactttcagatttagcagaaaaacaaaatccaggattaaaagtatcatcaagctctctatatcctgctgcttgcatgattaggcgcttgatttccttttctttcgccttcctatatgaataatcatcgtcaactaaaagaagctcgtaagtgatctcacgggcttcaaaaaatctctgattatctaagttagaaaagtcttcctcgccttgcgaataaggaactgaataagtgatctctttttctttaggtgttggtgcatccctcttagtaagccaccagcctttatcagctgaattgaagttagcaaacgtaaagccttcatcaggagcacgaaccataaccggcgaggtttcgattgtgtcatgaaaaaggccatcattctcatattgcctattaaactgtgaaaaaattctatcttcacgcattattttgaaaacctttcatttaatgaaatatcactaccgaatttttgattatatacatcagcagttgatccaactaatgcaccagtatccattactatttgttgctttctatcaagcttgctgctaatatttgcaattaaaccaagcaactgattattaggattaatgctaagttgactacgagtatcaagaataaatccagcttcgccagctaatgtactacgaactcgtccaattaaattctgggcactcttttgcgcatcttctgtatattcgtcaataccagaagcaatacctttagcaagccattgaccaacttctaatttcattacccttgaaggtgaatgaatatcagcttttcttctagcagctgcaactgcattttgaactgcactttctgctgcttgtctaatagctcctgatccactagagataccatcagcaattccttctgccaaatattgaccagttgaatacatatcgctgtgataagatctagctccactattggctgaactgcctaaatcttttccggttgatctcattgcactggatttagattttagaccgctctgcatagaacttcctaatgttgttccagtacttttagctgaagactttttactgtttaagccactgattgcacttgatcctaatgaagcagcagcagaatgaactgaatccttgccacttttaattccagaagcataattacttgctactgatttaccagcagacttaactgaactagttgatgacttagcaccattagctgccgctttaggtaattccttcgaagcagaagaaacagaacccttaccagatttaacccctgaagagtatgcagtggctgtctttttaccttctgcttttgctttgcctgtattagcttttaatcctttatcggcagcatcagaaacttttttagcggatttttgaacattgggagcttgagagcttaatccattagagatttctttagctcgctttgttccttcatcgttggaaccttttccctttccgccacctttacgtttagataagcctttatcgactttatcactaatattttctccggcagcttcataatttcctcgcttaatagcatctaagaaactctgctttccgtcactaccacctttaaacatcttggctggtaatttacccaaatctttcataacttggttattcattaagttaccagctttttctaaatctccggaagctacagcatttaagaagttttgtgttccttgttttccagctgttccaaagtactgagccattacctgcatacgttcccacatcgtagctgaatgttgattaatttcactcaacatttcttctaagccttgagtggtactaattttcatcttatttaatgcttgtgtgaaagtcttatgagttagctgaccggaacgagccattgactcaacaatttgagtattgttattgtcaatctcttgcagttttttctgatcgctttgttttaaagcgtctaattgcatttgatagccattcttttcagtttcggttttggcactagctaacttttgttctaagtccttttcacgttgtgcattagcttcatgttctgaatacaaagcattattttgttgctttattgcagcgatctgtctggttgtatcttctttagtccacttttcatgattatcaatcttaagtctaaaagctcttaattccatattggattgatcaattaaagcttgtgcaactgcctcattttgatctttaagggcttgcttttgctcatcagttaatttctgaccattagaagcaactccagattgcagcattttattattgtcattcataatttgctgcatttgatcagcgcccttagattggtcgcttagcatctcattaatagcagcagctcgtaacttccgctgattttctccgctttcttttgttgcttgctccattaaggcactggatttcttttgaatctcttgctgtttagaactccatgattttaataaagtttcgctggttgaaacatatcctttcatcccatcatcagaaccaaaggctgacttcatcgattcgacgacttggtcaaaactttctttattagccttattatcattttgcatagatttagaggcttcagaccacgccttttgaaaatcttttgctttttctgcatcatcatctgtcgatttaccaacttgctttaaagcattaacagttttagcagtggcactattattagctaagttctgccattgcttaccaatatcagaaattccatctttaatagcacctactgatcctttagcactttcagcggcgcccttaaagtcgcctttaaagaactttccgatagcctctccaccttttgcaatagcggtaattaaagctttaattgcaataacaattgtggagatacctgtgattacagttctaatagtatcaatcgcaccagcgactaccaacataatcgctgataaagcaaccaataaagtaccaccaataactattgcaattccttgcaaaactggtttcagggcttctaatactacttttaaggcattgattatcggactaactgtactttgcatactagaaaagctttgactaacaccagaaacaaaactagaaacaactccacgaatattcataaagttgtttttccacattacagtaaaagccacaactgcagcagttattgcagcaagtacgattccaactggaccaagtgcagcagtaagcgatgcaccaaatgttcgtgcaacacccaaaaccctacctaacccgctagtaattgcagcaatagtattttgaaaaacggaaagcaacataggcccaattgatcttagagaagaaaatgaagctctaattccagttcccattgttttaaaaatagaaactattctagagacaacggttctagcaatcgtttgcattgaacttcctgcacttagaagactaggtcctatatttctaacttgtgcggtcgatttttcgacattcggacctaatttattgaattcttctttgacaagatttaaacgatttctcaaaggatttaatgaattacttaaagcatttattccgctaatagattcagtagatttagtactactttcttcaatcttagttaaaagatttgaaagctccctagcagttgtctgatcttgctttcccaataaagaaatagcatttcttgccttatttattgcagtagttgatgcattacttttagttcctaatttatcaataattgcaactgcctcgctaatagcattctttgccgtttcaccagcaggccccattgtcttgatattattagacaccgcaagtatacgagcgccaaaagtttgaaattgagtaccaatcccaaagaattgagttaaacgagctgtagcagtactgattccaccagctaaacctaagaaaggttgagcaatagtattagaaatatttattgcagttttaaatgctaaaaatgcagtagttgcacgtaatactattggaattaaagcggctactttagtgctattttgctgaataaagttagctaatcctactagagcctgtgttatctgctgaactattgctcgaaatgtatttaaagccgcggctttatcgttttgcgcatacagtaagccataggattgaaccacactctcaattgctgatttccatgctggaaaaatctgcataatagcatcacgtaaaatattaaaaatatttctaattgtggctactgatcttttaatttgattgcctaatgcatcaagattttctttaatttttgaagaactcttgttaatccaacctgcaagatctacaccagttgccttttttatcgtattatcaatatcttcaatgatatccgctaatccggccttgacacggttcttcatattggctactgctgtaccaatacccgcagtagcattcaatgctgcttcatgaaaaccagttgcaccttgatcgagctcaataaaacgatcatttaattgtttcattgaaatctgaccagattgtactttagaatacaaatcttgcattgaaccagatgcaataccgaatgatttagctactttttgcaaagcataaggcatagtttcttcaagggatctccatgacatcatatctacttttccggtagaaagcatttgagtatattggattaaaccacgacttgcgtcttcagcactagcccctgatgcaataaaggcatcattcaacgctaaagtggatttagcagctttatttacgttatttccgacagccggataaagtttttcagtagtagaggcaactgtgtctaatgccgtcggcaagccgtcaacaccttttttcagcatgttaattgctgaggtactctctttaattggtgaccccattattttcataattcttggaaaattttgtagggtatcaaaccgtgagatcgccccatctaaggagctagtcatttctcctattcccttagaaattaaagagaatactgctgtacctttggccatctcacctagactcgccgtaacttggtttgtatcttcagacattcctcggatacgtgatctcatttgagcaatagcactagatatattatccctagcactaaacgttgcagtaacaccataactatcagacatcagttacctcctttccgttttgctatttgtttcttagctaattggcgtgctctttctgctctttgttgcaattgaagatatttattaaccttcttttgagacttaccactaattgccgatttttgccgctctaaatcaattccaatttcttttaatgatctatatttgtaatatccatctttatcagtaatagttgttagttgctgaataaatggaatctgataaaaaagactctccgcttcaatatatgcatagcggtgagcctttagtctttgtttccattcagtcagagtcatatttcctatttcttcacgagtaaaagtaggataatactgcatcattgtaataatgatttcatcaaaagttattcttgatttgctagtttctccattggatttttgatcttgtcgaatgcttctgtaatcaatggattgatagtcttcatcatccgtttggtaagtggttctgtcttgaaaaaatcgattaatactttatatagatctccactattcttatcacgaataactgctttttcgatgtctttttctttgatgttgtagcgttttaatagcttagtcaaaacatcaattaaagtaaaagcatctcccagatttagaccagccacaatattacttaaaatttcagaattttcaccaattttattgggtacaaaaccaaaatcacgtaagttgtttaaagttagttccaaattgtaggtcttaccgtttaaattaatctttttcattaatgcgtctcactttcattattagtattagagctaattacgtttgttacagttgaattagttgttactcgcaggtttatttgtatcttcaggatagatttgactgtattcatctagacccttttcttcggtagcacttgcggtggtatcacggaagaagttattagcagtagccacatcttcatcactaacagttgcatacccactgactaacttaccatcaacattcaatgtagttttaattgtttcgttgtctcccaccttatcaggagtttcccaacttgagagatatccagaaccatattgagctaaatatttacctttactatctggtgatggtttatcaaagttgatttcccagcaatctactaattcactatgctttgcagcataatgtaataaacgataagttggagaatcagaagctagagcttcaatatcaatagttgtagtaatttcgccaggattgttaactgtaccatctttagtttcagtagtagcaactttcccagcttccttaatagtatgtgtagtttctaatgccaaacgagtagcatttttcttatctctatctttggccaatttaaacattagaactttgcgagttccacttaatgctttttgcatattattttcctttctatctcaaattaaaatctaaaattaatcgtccatgctgcaattgaatactatctgcagtttcacccaaaatatttgatgaactgcctgtcaatccaaacaaataatgattagtagtaatgaatttcgggattaattgctgaatttgctccataatagtagccacttcagctcgataattgtattcagcaaaaacatgaatggttaaattactagtcccagtgacaaaatccttagcatagatatcattattaatttgatctccgaccataataaaaggatatccttggctctcgtctggtaaataatcgaaagtgggataccctgtctttttgcaatattcaattacagttttaaacaattcttcatatggattcatcttgttaaatctcttaaatcatcaataaacttcatccgttctgacataaatggcacaccaacatattttctagctgtccataaatctagttccaaattcaacataagcagcataatttactaatccaccaccataagtaacagaaccagtaaatccatctctgctaatttgaatctgtgcagattgctttaaatgccccgtatcaactggaacagcttgttgagtagcagtcattaaattggctgtatgtttctttacaacctttttaacagtattcatattttgctgattagccaatgcttcatctaaagcatctaatccatcccatgaaatactataatctgccatgatactcaactccgatcaatgtggttattctatccgttgttcgtgcactagttacctctaagttgcaaggtaaagaattagatttaatgtaaccatttcgaaagtccactggaataggcaatctaactacataaggtctttgcttagcatcaccaaaaatattaatggtttgatctaatcccatctgagtgatgttagctggataagaactaactttattagtttgatgtttttcaattagctctaccattttgtcgtatctcatatggattcacccacattcctttattcatgcccgtatggtctttacgccactgatttatttcatcttcccactcatcaaaatcagaggaagcaaaagttatagactctccatcttgtgagtagctggccataccttcatttttaaaacgattaaatttcttaacagctgctccacgaactatagccagcatttcggttgggattacgccagtaatggataaccttaattttaaaaagtcagtagcatcttcaagatacagctttagaagatcatcatgtttagtatcagtcaattgaagagctgttttaagttttttgagctgatcatctaatacatcattcattttgatcttctttcttatcttccccgcctggagtaggttgcttattaccttgcggggttatgctttttttactgatacaaaaataccatcacgtttatgcttcttaataaataaatcatggtataaacgattttgatatagatatccatcgccgtcagtatgttgacctggagcgaataaaaataccgcattttctttcacaattgaaataactgctggttttgcaacaactaagaagttaatcgccttagcatcttcagtcggctttgcaccatcagtaaaatcgtacttagtcatgaatctattagattcatacacttcaatcaattgcacaccatcaatagaagtaatacgtgattcaagtgcagtagttcccacattctgattagtgatatttcgagtaaattcttttgaacgctctaatgcatccatcacttcactagacacataacctactaagttttgagtaccatacttacgtacttttccaatacctgtcttcaattgtgagtaagcatttgtttcgtctaaagtttcctcagtcttatgggtcttagctaacaaagtaccttcagtatcggtaccatcaagattatcaaatgaagtagcgatttttgaaaagcgataagaatctaattctggttgaacgtgttcagtaataaatacattagaaatattagccattgctaattcattatctgtttcatctacatcttgtcgatcaagatagaattcaacatctcggtcttgtcccatcgtataaatagtcttttcatctgaaattgtacctgaattaaagccttttccacgggtatgatcttttaaaccactagtactaatagtctttaatgtaaaagaacgtcctccattgaccaaatcaacctctggcgttcctaaagctgcagtaaataaacctgcagtaatcttttgatctaataaatttccatcttttgttacatagttgaaacctctagtttctgcatctgttggcatattctaaaatcctttctataaacctagagcacgtttcaagtcttcttgcggagttttaagcttatttcctccaattttaggagtttggccttgaagaattgagtttctaccttcctcacgtgctttattaactaaatcaataattgccttggcgttagaaacagttaccgtagcatcattgttaacaaccatattaagaacatcgtcaccaatattcagatctgccttcttaaatatcccattaacttctttaatgtcatttgaacgtttaatttgagcatttaaatcagcattctgtttttttaatgactcaatttccttagtacgttcatcttcttcagtgatttccttagcggatttgctactcttgccccttaactgctcgatttctttcatcgcatcttcgtatttagctttataatcattcttttgtgcttgttctttagtgattcgatcaatataaggttttacaagtgaatcggcatcaatttttttgaaatcatctttattctctgaactagatgctgcaactttatctggttcagtagtagaaactgtttctttcacatcatcttttggcataattaaatgtcctttctataactcacgttttaaagtttcggggaactaacacatggtgttctttaatgcctgcacacaaggaaaaaggcaaaataaaagaccattgaacttaatcaatagtcttaaaacgtattttatttcattaacggcaaccaatctctaacttctttaaagatcttatatgcttttttcatcattgtattttcctctagatattgaaggccatcactagttatataaactctatccatattagaaactatagtgcctgttttagtaggagtaaatttcagccctttaatatagccatcatccatcaacatcattaaggttttataaaattgattattggatattttaaatgtaggagcatccaatatatccaaatcgggattctgtccctcttcatagcaatacttcaaataacttaaaattttataagctacagtaaaatagtcattatgcgccatttatttaacctttcaaaccagttcagcactagaataatcaaactttccttttattagtaaatcaacaatttttttcttgttagcctctacgctttgagtagctcttcctattatttcatgtttttttccatcatcagttaataaatacttatgaccataaatatcattagtgccttgaagtgcaacccaagatagattcttttcaatctgtggcgtgacaattaccacttttagttttttagccatgatgaatccttgctttcttagtcttccaatgatttaaattctgctctaattctttaatttcattatagctgaatttcatggccttagcattttttagcagatatttttgtgcttcaatttctaaatttacagtctcttcctcggaaagctcccacattgcttttttagcatttttaagctgtctcgtatgataaagttcttcttgaattgctgaccttgtagcccaagaagataaagaaatatgtgtactatcgagagttgaagcagacgcacttacactacgaagatgtctatcaacatcttcactcatatccactactcctccacgactaataaatttacgtagtattttatttaggtcgtaagaagacacatattttgtccctggtaaatgataactatttttatgaaataattcagatgctgatttcttctcattatcgatttttttaacatcattgtctttatcgtctacccaataagcagaaatagcacatctacaattaggatgagtttgtgcagggatggtaggcaccttgtcatattcatatacgccactcccatgtccgttgtccgcactaccaattgaagaacataaaagacaggctttaggttcgtttatccattttacaaacctataacctgccttttggatacttccccattgagccatataaagtactctggaaacttcagtattaagaagcctatctgcaacatatctccaattatggacagtatcagtcattaaagactgcattcttttgatatcaaaatgagctaatccagtagcaagaacttgttcaagattagctcttaaccctacttgattagcccataatctacttgaccaattagctccatttacatccgcagtaacaacaccctgaatagctgcattattaagcatactatcgtttttaccacttataccaaggatacctgattgtcttttggtttcagcaatgtatctatccactaaagtgtttcctgtaatagatgcggcattcaaactagctcttgcaacttctaatgcaatgttagctctcagatattctaggcggttaattctcatagtagtgttatagacacgtaactcctgattaactgcttcagaatagtctttataagtaacatgatgaccttcttttcgcattttagccgcttgttcaactaatttcttagccttacttgaataagcttgaacatccatttgtgtcacttgctttttagctaattctaggccaacattacttctttctgccaaagaagatatctctgctgcaatttgctgattaatattatttagcatcgtgtcataatgcttgttcaattgagcaatagcttcttgatcctgttcaatgtatttttcaattgcttctttttccattgcttgacgatcaagccagtacttactactcttcttcagcattattatcacgctttaggatatcaattggcatactcaactgttgcgtttgcttaatggcatctgctttttctttggcaatttgtttcatttctgcatctggttcaatatcagggatcattcctagttgtgtcttcttagagacaattccttcagcattctttgcattatcaattgcactagccatatcttcaggaagatttctagtgaatttaaaatctaattcactccatagttcttgatcttgcttattgttaaacaatgtagcaagtacaattctatatagctgcattaatgacttatcaaacttgcgctctttgctatctgccttatttttcattgcaaatagtttatattgaagagcaacaccactagaatttccagcaaaatttttatcctggatattaggtaccatagccatcataaaaataaaatctgttagatgctgaataagattttcttgcatttgatcagcatctggtttggcgataaaacctatttgtggatttgtatctggatcaagctggctaacatataatacacgattgtttttaaaatcgaatttaggattaccttcatcatcttctggaagcttaaagccaatcatatacatgtaggcattatcaaagtattccacttgattagccttctgacttatcactttatctaatgcattaatcagcgttttaatagaatcaaaaattccctgacgttcttcattttcgaagaactcgactgcaggaaccaatccatatggatttattgcatagccggctgcattagtatcttcttcaatatcataacctttaaatttataaaacttgtcagcatactgaataactccataagcatctgtccaattgttagaattatcaatctgataatgtacaaatgctaaaggctgacgttgtactgtatcatcataaataataaaagcatgattagggcttgaatacattaagtgcggccttgcatcttcgccttgataaatactggcaatagaacgtccaaagatatcacactgcttactaatttcattaatggtatcaaaaaaattttcttgtctattccagcgggcaatttcatcaatttttgagctatcatttaacaaagctagtttaggctcaataccacaaaagtatccattgtacacatcaacgacatattttgctgaattaacgacaatccgattatctgctccagtttccttttctggtgcggttaatatcttatgtttacctagatataacttcatattctctctatatctaggtttcaaaactgtttcgttatatgcaataaaacctaataattcattactagttaatttttctcccttaggaaaaataaagctactgtttccagtaactttatctcttccataattaatatctttcaaaatctcactccctacatgaatgatttaagtagcgtcgctttcgtacttccatgaccattctcttcctctaccgcataacgaatagcatcaatacagtggttatatgcatcgatcggcctatttgtgtattcatcggtcttcttatctttcacgtatgtgtaattctgcaattcttcaattgtcttaacgcaacgatcatcaaccacccatttaaattgctgtagaaattgaattccttgaattattgaatcaggaccttttaatgctggtctaattcgataaataccgtctcttttcatttcagcaattgatttcttttcagcactatcagctgttattacttcttttgaatagcccatatccttaattacttgtgctagctgattattaagcaagccttttttaacaaattcatccatcacataaagtgttttattcctcatatctagcttgatatgcataaaagcacttggatcattgataaatccataatcaagaccaaaataatcatttaacgctaataatttaggatcacgaggattaagtcgcttagtttcaaagtaaggaaaaacaagtttatctaatgttgcaaactcacctaatgtataaatcttgtaataagctggattagtatttttcagttcttcaatcgttctaatattgtcttcatctaaaaatctattatctttgtaagttgattgatggatagctactcttgaccgatcataatctgcactaggatcaaaccaagtctgataagtccaattgagttttgatactgggttaaacatacaaaaaatttgtcgctgtttatgcttaggttcacgcaaacgcaaagtaagttgagtgtagtcattatgattaaattcacttgcttcttccataaccacatcagacagccccttaatggatttaatcttttctggatcatccataccttgaaataaaaaaatcgccccatttggaaggacgattgttttatcagatctatttacatgacagtattgaaggatattccatccacttaaacactcagttacgtcagtaaaaattgaatttttaactgttctatcaaccttacgtagccaaagcacttttcttggaacattccaatgctgcaatgatttcaatacaactttttgtactactccatgacttttaccacttgatgcaccgccataccacacttctgttaagtgcgaataatcaaaaaggttgttaaagatctgtttattaaatacttttgagggatgcggaaaattaagttgaatattaaccatcataatcaccaggatctatgtttactgtaatatcggtttgagtttcaactttatcggtaaaaatcttatagtatttaccaagtaattctaaagcctttaattggtcctgatcttctggagtaacagtcgtgacattatcatattcaactttaggctttttccctttataagaaatacgcttaaaaaccttttctctaggttttccaattgctaactggctcaaattatccagaactccattaatatcaagaatatcgttaactttagtttgatgcattgtttcgctaagatattcagatacgttatcatttgctatcaatcttgatccattagctctcgcttgattatcactttttactttataaacagccttatacgctctagaagcattgaaatcttttaaatattcctgacaaaacttcttctgttttggagttagttctttcaaattatcaccaccttaatttttgcaaaataaaaagccagcttatgctgacttaaaaatcataaattttccagacaaaacttatattgtttatcgtaatcttcaaattcatcaattatattaatactagataatatctctccatctttagctactaaattaattaaaatattttgaccaccaatcccaaccctttctttagtttttttgtcgtcaatatttttttcgattttcattagttctttgaatatatgaattttattatttgaatcgcaattaagcaaataatctatcgcttcttcacactgaggctttaatatccaattaggatttgaataacttgcgatctcctgaatatcaaatttattagtgctcctaagagcataagcatgtgtattcatatcttcatcaaagccgaagatataaattgttgtgtctgtatttactttttcgatattattttttaaaacatctcgaattattagactaaatgttttaacttctttcgataaaattgatctagatctatcaaaagctagtctaataattgaaaaatctccagttccacacaatatgctttgagtaaaaggataatattcaaatttttgagtaaagtaagatggaatagtttttccattgttgttttttctcgatgctaaagtatccatagataaaataatactattaggactaatttcagcatttaaagcagtcataaaatcacctcaataacaattataaaaaaatcaatttcgaaataataggattcattctttgagatgaatataaatttaagctaactaagtccaacaatggtaaatattttagaaccactgctaaaagtttaataatatttccattaaaaaagaactggcctttcgactaactcttatataattatttattcaatttaaacttttctggattatttttcataatatccaaagccggcggttgaagtatatacaaaatcggaacatcatttatatcttctatttctccaaatttagtatatgatacattcttagttttaactattactttagattgatataattcaagaacattaggatcattttcatgtaaatagcctttatattgaggaggattattaaataatttcctaacaatatttagtttttcttctgtgagacctaaaacatattttttatattcttgctgttcttttttcgttttatatcttttccaaattacgtcgccaatatcaaggccaatcgaaatccaaaaaatcaatgctacaaaatatataaaaagaaaacacatagttaatactttacccactggcaatgtttcaatataagatcttgacaacaaaactatcgtacaagtaatagctattagtaatcttgttttcatgtttgacttaagagcctcccatgctgtctttactaattcttccaattaattacctccattcgtttcaaaaataattataaaaaagccaagtctaattaaaagacttgactttcttgaaacgaacggaattttagtcctaagaaggactatgggaaatactggaatcgaaccaagcttaatgtctcaccatttagagatatttcccacttgctctttaacaaaataattttgaagggacattcttaaagaatgtgtgtatgcgcagctaacacagagcaatagcctcaagtgttaaatacataatatagagaggaattctattaattcccatagctcgtacaagaatcgaacttgtgttactggtatgaaaaaccagtgtcttaaaccacttgaccaacgagccagactaggaaagccgcatctcttatgctgcgcttttacgattgttgcagtgtgtgctttacagtttaatgtaggggttacattagtcacatgttcagttcacccacctaccgcgaaaacaatcaacctaataactgtaaaattaaatgacttatttcgtgaatttatcatttaaattactttaccaattgtatgacaaggtaaagtttttgttttacgtccgttttccgccggacaatgagcagcgtggggatcgaacccactgtatattgtgaaagaagattccttctttctaattccaaattgtgtcatactgcccacgactatcgcgcagtccactgaacgatagccaactcttaactacaatacgctcgccggggcgtcgcatatcagtcctagatcatagcgtgacctaggtaagtagcaaataggaatcgagcctaaatgctactgcacatcaatcatgagactatttaacagaaattataaatttaaccaagatgataaattaatgattgatgtgctaggagatcttttcagatctaaaattgtaaaaaatatgaaggattggatcttttaacttgaaaaactcatattaccgtgtcggactttcttactttccgacaatatctatttaagcatagatagttgtcagtaaattaccaccatattcccacaaaaataccctatttatatttatgtaaatcaataataggctggcaattgttcactctttgccaatagtcaaagccatcagcaaattcaaacattgctttccttcgtaaataactgaacttgttgttttcgctataaactaaaggtttaacttcattccatggccatttacgtataaatagccctatcaaaataatttgagaattatgcgagcaatgatgtattgcatcactagtcgcttttaccattgcctcagcattcaatcctctaataatcgctttttcactattattacttccattactatgagcaggagccgaacttaatgtaggagacttaagatctaataattcatggccactcatcaatagcaatcgttccaaatctttgttaaagaattttgctacttcttttagcgtctctttttcatccaattctggaaataaactcactgtatcagctcctagttctattttctatccttctaagccataatctctatatggttcatcatgcgctaagtgatagcgcctgtattcattactcatctatgacatccttaaattcataattcatttcgtctctatcgtatttttcataaatcattaaagctgaaaacgccagtcctgaatcccccatatcccagggagtaacttgatatttaattttttctattgtcaatggaccttctttttcaagaaaatcattgatggcatcttctaaatatttagatgcactttcttcaaataacttaactttcatctttaccaccttgtctttcttaaatcgtatcctgttctagccacttttgtagtccagaagcataatcccttatccagtcactaataacttttccgtcaggcaagttttcccaataatccggatcaaactctacagctattttggtttctaaatcagaactcatgtgatagcccgttctatcatcccagctttccaaaatagagttctttaattcttgacgttctgattttgataaatagcaatcatcattttcatcggataatagtaaataatcattaagctgttcatctaaaagactgtaatcataactccataattcttctgctgcttttactttagaaacaaagtagcctaaatctttactgtattccgcaatatctcgcaaagtgttttgacttgaataccagcagaacactgcaaatccaaaatcaccactaatgcttaacgttgaacttgaccgatcgaaaaggtaatttattcgatttttccattcatattcaggatctttacaagcaagatattctattttgttatcaaagcatttgtattcaaatacgtggttattaaagctcatcttaaaactccaacttaactctcttccgtttattatctgctacccatctagcagttacttctaacattaatttttgaaaatcctcattttgccatgctgacttacctaatagttgactccgtgcatattcttcattcaaggtgtctgcaagcttcttgctggttaatttgctataggcatcccttcgactttcttttttctcctccgcataaaaatcattaaagggattggccaatgctaggtgctttctttttgcttgatagccggctgaaaatacccccccgattaagttaagagcatctaggtcttctaacggtttatgctcatcaagtttctttacaattgttttatcaacataggcggtctttagatcacctagtacatcagatgctactttcatttaatttctctccttatattttctggctatgaagttaatccttgcagtttctagctgcatctctaagcgtgacatagcatatagaactcctaaattcaaaagcgcagttattgtacctttagctattgcacgttgcgcaccttttctatattgcttttgcaattggttaatagtcatttttgcttgttttttcttcaacttatctctttttctcatttttaaatccttacacaaatctcaaaaagatcaaaactatatcaatgattgttaagcaagttattggaacataagacttttgatcgtctctaattacatctataaaaaataaattaattaaaataaaaacgcaccaccattcggcagataattgtccgctcattgtttttctccaaactctttaaagattttgtttctttcttctacagtaatttgcggtgtagaagattgtttaggacgatatgtactccaatcagttgccttacgaacatatttattttgttgattaaaacgaggcttaataggtgtcatatctaaatcatcatcgaatcgaccattaaaccatgtagatccattaagggtatattctagtggggtttgtttaagcttcagaaaacgaatgtatttttctagtttttctttcataacctcaaaagtattgtccttactctgctttcgccaagctttatagtgccttaatgcagctttctttccttgttttttaggatagagtgcccataactgttcgaattctgagtcataaatttgggtcggagattcggaagaatcgactatattatttatactatccttacctaacctatccttacctaacctatgcggtccatttgacgtccattggttgtccactggacgtccattattttcaattgctttaacaccagtcttctttcccgtatctgctcttgctttagcttgctgaatttcaatgtctggtagcattttgacaagtaagtctcgatagatagagtcaacttttctatcggaccgaatgcggttattttctttccaatcatttatataagtaaccagatcagcatttaaaactgttataaggcctttagctgccagaatttttaaatcatcttcagtagagccggtttgtcgcatcacgttatagccttcaaccactccatcatcgtcggcatgtatgcctaaatgaaaatataaggcctgagttgacggaggcattttaagaaaacgggcgctctctactattctttgtgagaacattctacgttgtgccaatcatttcaccacctaaaacaatttatctacttcaggatctttagattctactttcttatcttcaaatggatcctttttaacagtttgccgaattttatcaattgcagcttgtttctccttagtttcttgttttactgaatgattttgcttaaacatttcggcaatttgatgtacagcctgtgcatcttgcggtgtatgtggttccttcagccagtcttgtgcatctttaatgccatctttcgcttcttgataaagatcgtataagttagcttgtatgccattgtaatagactttatagtcctcaagttcttgtttagttaagattttaggttcgtaaatagtcttttgatcttgtgcatcatcgtcattatctgcagcgatcccaaaggctccactaagtgaatatctttttgcataactgataagactggcggttgcttgtgcgtcccaagctttattattttgaaataccaccttattcgttttgagcgtaaagccagaagaatctactaaaattgtttgtacttctacagtattattttcagttctaatatcgaaaaaatagctaaatacgacattgccatctttatctgtaacttttttgataccatccattactgcggcatcaatgtcatttaaatcagcataattatagtcatagctatagggtgtaccttgcttggtttttccagaaacagtaactttatgcgttttttcaggctgtttaatattagccttcacttgtgcataatgcattgcccacttagctctgtcttcttcttttccatagatttccatcttagttcaccctctcatagctaataccccagtctcgaatgaaattagatagggctgttagctgatcggtagtaccagtaagtttaagtgtgacgctatgtaccttatcaactacttcgcctgttttggcatcgacatacttatcgccatgttgttcaagcgattctatagctttcttacgattttcttcttgctgtttagcctgcttaattaaatattcatggtcattatccatttgagttagtacgtcaggtagcgacttataatcaagcatttgaagatatggactagcagtcatagcaggtttagtgtactcactagccttagtagcaataacttgctcagcttcttttctagcctttagtctttcagcaattgctttaaattgttgtctagcttcctcctcaatttttccccagctagctgtcttgttgtcccacttttcttggtaatcaagctcctgtaaaggtatattgtattcaactgcaatcttacccagttgcaataaattctgttgatgtttgtcttttttagctttatcatcaaaagacttaattccttcactgatgtgatcaactgctaccttaattttcaaatcaagtgatttaatttgagcagtaaactcatcaataggttgactagcttgttgtgtaattgattttcttcgctcatttaaggcttttcgaatgcgatttaattctgccctagtctttttatcataaggatacgatttagaagttactacatagctttcccatcctttagctaaatcatctactttagcatttagtgactcgtacccaggaaagtctatttcagcctttttaaaactaattgggaaattttcattttcaaacgtaatcatgtcttttttagcttcgttaatcttattcatgttataattcctttggttttgtattttttgtagtcgttaaactgttggcgcagttaacggcttttttgttgtcattaaatctgtctcaaattgtttttgatattcatccggtataagcggttgtcttgtttctctagtgaagaaagcattactgttactgattaattttgtttctaatgtcatttatctcatctccctaaatatttggaaaaatcgctgtatacatcgtaaaaataagtgctactaatgctgtacacatggtacctagcgtaagtatttctgtttcacgtactgtgaaatcagtacccatgaattcgttgatcttgtggttaatccatttactcatagtttgtgatcctccataaacttttgtaagacatccttgtcatataagatttggccatcaatactaattggcttaaaatcaaactttttcagccaaattctaaatgtagatgggctaactcctaagaagtttgctgatgctgtcacgttaaaatacttctgttgaatagctctttcaataactcgttctgggattgcgatttgcatgaaatcatctcctttttaatgaatcaaaatactttccttactagctctatctactccttttacagcaagataagtttcttgctgaagatggataaaacttagaatatcttgaatttcttctggtttaccttctagtgtcaccttcatttttatctcctctcaattcatcaagactaacgcctaacgcatcagcaattttgcacatagttttgaatgtaggctcagtctttaaatatctataatttctaattgtttggtaatttattttcgattcatttgataatttacgtaaactccaatgcttattttttaaaatacgatcaactgtttgccacgacatatagtgttatcactttcctatctactttatattgtgttatatttgatacatgatattttttagaaagaagagacatagtggcaactcaatataaacaatctatctgcttaaatggtcatcagattactgatgaatttagtcccaacgaaaccgtaactggctattgcgaacaatgtggcgctaagcttattgatagctgtccccattgcaaatatcctattgaaggattttattatccagacggagtagtatatttacgaagtccaaatgataaacttccagtacctaaatactgtaaaaaatgtggcacaccatatccttggactaaagattctttagatgcattgaatgaagtaatacaattgtctaacctatctattcaagacaaagaatctttacaggcttcaactcctgatcttttagttgacacacctagaacaaaagtagctgttttaaaatggaaaacaataggtaaatccatattgaacttagctcacgacattattgttgaagtagctagtgaatcaatcactaaagcaatttatggaaactaatctatttccacactgttcacagtaattaccatcgtgaacgacatgatgacaattgctgcatacagctaaattcatcaacttaaagtatctactagcagcttttataaaaataagctgcttttctttttgctctttttccattgcttttacctacacttctacttttctaagcttattaacagaatactgttgccccttacctgttaccttaggtgtcttgctaattgatgttgaaccgtttgaatggttaatcgttgtttctttgatcttgaacaaaccaagatccattgatttctgcgttggcatgttccaatcactacccttacgattgatcagatatccatgttctcgcatccaagcaaacaaacgattagctccaatatctattccattacctcttaaaattttggccaactcgccaatcaaaattgtagtgtggctagttgctactgaatctgcaaacaatgccttaggtttcatttcagcaatttcaatatctttttgtttaagctgatccgctgcttgttgaagtaagtcagctaacccggtcttgttacggactacatcgaatgctttttcgtcagtcatatatgcaccgtgtttgcgaattgctggaagaacttctgaagtaacccatcgtttgaactttttagcattgggaagcttacttgataagatcaaactgtacaatcctgattcgttaattaatatttgatctctcatctgacctgcggtactgatttggtacctcagcttatcttcctcgtcaacgtgagtatttatatctctactaccattcttatatccaagaatagttgctacatctttaccaacaaaatatggttcttcatcaactgtcaaagttctaacttgttgattttcaaaattaaataattgcagtttattttccattcagtttctcctctcttattgttcaaattaattttgaactttttcatcaaaaaaatattctgcaactttagacctatccaaatcgagtaaatccattgcatgtgcaatttcatttgttttccaactaactcggttatttagcttattagaaagactatgttcagataaacctagtgcttttgcaaaattatattgagttccatatttttcaataatgcgcccattcaattttctaaaatcaaatgccatacctatctcctttctcttttgttcaaattaattttgaactttacacaaactataatacactcttaaaaaactctgtcaacatttttcttcaatttttttgaactaaaaattgaactaagttcaagaacatcatataattaaaatataaaattataaaaatataaaggatgtgagattaagtggaaaagaatcaaaatgcagataaagcagaattatactctggaaatcgagctgcagttggcgaccgtttaaaagaatacatgaaagaacataacctaaaacaggtagatattattgaaaaaactaagcctttctcaacttctaagcttaagattacaaaaactgatttaagtcaatatgtaaataacaaaactgatcctcgctccgataagttacatttacttgcaaaatcattggatgttgatgaagcatggttacttggctttgataaacacgcccataaaacttctcatcataattccacttcaagggatgaaaatgaaagtcaacaagctgacttagacgatggcgacaccatatttacttttcaggggcgccctattccgccagaggatttaaaaattataagaaggttgcttaaaaacgatgatgaataatttaacagttacttatttatttaattacgcaatggctcatgatattcaatttgaagctactcacttacttcatcctggcaccccttcttgttgcaatactactaaccgaaaaatggtcattaatcttaataatgacgaagaaggtttaccgttagaaatagctcatgaaattggtcatatttttaatggagacaaaggtaaattttattattgtggtgatagtcgttcatcccctgtagaagtaaatgcacataaaacaggtattaaaattcttgccaattattattttgaggatattcctaaagaagaatggaatgtagataattttatgtattattactgtattccaccctcttataaagattggactattcaatatttaaaatcgctataagcaataattgtccgcaatgacgttaaactaaaaatatataagtatggaggataaaatgaaaaagaaacttgttattgcagttactagtttggctcttttagggatggtgactagcgcttgttcgtccaacaataattcaagtaatagtagtaaatcatcttcatcaaaagtaaataagcctaagaaagtagttccatctgataaagcaaaagatagaacttggacttataaaaataaagttttcgatgctggaattgaaacttacaaatttactaaatctgaaataagagattctgctacagaaggtaaaaaattattagttctttattgtgatgtaactaataattcaaagaaggaacaagatccatctaacgtatacatggtagtccatgcttatcaaaaaaatgacacttctaatattcaattagatcctggctcagccgcattagatgataatggcaatgatccattacaaacttattctgataatttaaataataaattgttacctggtaaaacaactaaggcttgtattgcatatgaattaaaaaatgacaatccagtaactgttaaattcgaaaattcagattttgatactattggtcaaggaatctatcaaattaaataaaagctggtgattgttaatgcgatcattcattagaaaaccatcattaaaaaaatctttttctgcacgaactaaaggcagagccactcgttcaatgaaaagaatgattaacccaacctatggtaaaaaaggtacgggaatgctgacgaaccctaaaaagagtatgtacaacaaagtttattcacatacttcaattagtgccatgcctaaaggcagcaaaaagaaaatatcccgtagccactcagatgatggttgttggggatgtggatgcttaattatttttatgattattgtatttatcgtatgtttgttagtttaggagaaaaaatgggatttttatcaaaaagcagaaaagctagtgggaaaaatttatatgatagcgatgttaaaccacgtttagtagaaaaagatggtaatactcacattattatgattaatagctttagtaagtttctagatcagaactttggcgtagaaacaaaatatacagaacaaattggatctgtagttgattcgctccaaaacgatggctatgaaattgtagatattaaatttgattcattaaagggtcaaggtatcaccggaacagctgaaggatttcacactttaattatgtataaatagatgcacaaatataaggtaaaaccaatgactatacaaaataaatacaatgtttctgtaatatcatttaaattaacagattcttctggaaaacaaatttacactcttccttttaacacaaataaaaaggagtacaacaaggttgattctgaatgtgtagtatatcttccgaataactttatagaaaattttccaaatgcagaaaaagtcttcttccatttatctacttatgaaaaaatcagttttgattccggtttactttatcaagagacggctatttctgttaaagagctgccagctaatggattacttaaattgaactttaatatgaatttccctagtgaatttaagccttataaattggttggatacaggttttctgtttccgacaaagatgctatgcatcaagtgaccgatgaagatgaaaatgagggtgttttcttcgatacagttattccttcagaggtaattgacaatggctaaaataaccacattacccactgcaaaagcattttatcctaaagacttgaagaaaccctcaagactatctgataataatggtggaggtgaaccacctatggataataaatatgtaactcatcaggaattagaattaagcaacgaaaaactcctgcatcatatggataataaattcgctgagatgcaacagcagatgaatcaacaatttaatgaagtggataaacatttcaacgatcttgagttaaaagtcaatgatattaaaaatacagcaaataataacaaagaaaaaataaactggttattatataccgctattggtggaattattatttcagtaatcactacaatcatttctaatcttttaacaaaataacttaatccatgaattatagctatttttgaatgtcacaaccagaataattagtataggaaaaaatgaaaaagaagtatgttattgcagcaagtttattagtagcactgggaatgtctactgcggcttgttcatcaaattcaaataagtcaaattcaactgttcaatcatctaaaagtgtgcataaaaagaagtcaaccaaattaccaaagcctgattatgcaacagctgaagatgccgaagcagcattaaatgcaggaaaagttcttgaaggtaaaactgttcgttttagagtaaacgatttaagacctaaaagtgcttttggatataatttagaaactggcgagcatttaaactttgttagtccacataatccaaaagtaaaagttggcgatgtagttattgttaaagtgaaagaagtaacgtctaccctaggatcatttgttattaagtattcaagtctgcgtaaagtaccgttaaattctttatctaaggcagaaaaagaaaaattaattggaaagactgatacagaaaataaatcaaacactgagactaattcttccagtcagcaatcttcttcccagcaaactactgcacaatcttcttcatcaactgttcaaaatagtaacacagctaagcaacaatctaagcctaaatcacaaggcgagattaacaaggaacttggccacgatccaaaaggtgccccactcttaccaggacaagatcatgctgctggcgcaaacgtaaatggtgatcctgatccttgggtacagggacaaattgattgggctattcgtgaaggttacatgaatcctgacggaacggacactgaaaaaggtaaacaattattacaacagggttctgatgatgaagacgcagattccaataattctagttacgatacaaacgatgatgattcaagttatgatacggactattaaaaaataaacaaaaatcccactgatgcgccaacatcagtgggataaggaaatgagctacgccaatagctcaaattaatgttttaaaattaacaaagccataaaaatatgaactctgccctcttattgtagcagagttcatatttaggctacaataggaggttttttattatgccaaaaagaaaaaatacaagtattaaagattataaattaaaatctggtaagaaacggtatatgtttcagatttatttaggtactaacagcaatggtaagcctatcattacccgcaggcgtggttttaaatcttatgctgaagcagaagctgtattcaataaaatgtcacaaattaaaccagataattttgtaaaacaaaaacaaattaaagtagctgaattacgtgaactgtggtttgaaaattataagacccaagtaaaagaatccactgcaaataaaaataaacaagtctttgataaccatgttattcccgcttttggtaatcagtatattgacaagattacagtggctgaattacaaaagtgggctgatagaaaagcaaaacagattgttaaatatagagatgctattaatgaattcaatgccctttttgaatacggtattcgcttaaactatgtttctgaaaatccgttaaaacggatcattattcctaagaaaacatctcgaccacgtagagacactgaacataatgtttatacccaagatgaactaaatcaattccttgaagttgcaaaagattatggattggtcccgtatacttacttcaagctactttctgctactggtcttagaaaatctgaagctctcgcgttaacatggtcagatattaacctaactgccggtactttatcagtaaataaaaccttggcatatggtttaaatggtaaaacgattattcagccacctaaatcaccaaaatctaaacgaattttgccgatctctgacggtttgaaagaagttttgatagattacaagcgaaagcagaaaatcatctctaaagagctatttcacactaataagggaacttatttaagaataagcaaaccggatcaatggttaaaatcaatttacgctaaagaccacgaagaaaaagctgaatatgcaaaaaaatataacttaaaagagccacaaccggatttacgtcatattacagttcacggttttagacatacttttgcaacactacttattgcggaaactaatgtaaaacctaaaacagttcagatgttacttggtcatgaaaacattcaaatgactttagacatttatactcatattaacaagaaaaatacagaagatgcagtcaatgcattaaagcaattaaatatataaacaaaaaaacaccttttttagccatttcttagccaaaaaggtgtttttattacttaaaacattgctatatcaacattcttttattcaaataaggagagtacaggatttgaacctgcgcgccggtataagccggttcgccggatttcgagtccggtgcattaccactctgccaactctccaattacaacgtttttattatagcaattaaaaaataaatggtaaatacaaaataactaattctaaaattaatctttaaaaagtcatcattctttcatagtttttctgtatcttaaagctatactaattgataatgaaaggactcgtattatggcaaagatcattatttacaagccccgcaaaatcaagttgatgcgccaggctgttgagcgttatctaaactataaaattgttaaacataattagattttttagccaaccaaaagtggttggcttttttaatttaaaacatttcaataatcttttccattagtggcgtcacctctctatctttacgccatactaaatttaagtgggtaatccagttagtatgctttactgggataatcttactttttgcataagtaaaggcaatcgattccggaactaaagctatccctaaacctttatccgcccagtgaattgctgttcttgcatcatcacaagttactgaatagaacggccttattccctgatgccgaaaactacgattgaatacttcttgaaatcttcggtataaaattatcggcctatcttttaattcatcaagatgtttaatttctcctctttcaaaaaattcttctcttgtcactgctaccattggttcctggtgaaagtctttaaaatttagtccttcaagattaaaaggtgtccgcactattcctaaatctactattccgtcttgtagttgttcaacaatgccaaaagtatttgcttcatgtatttcaaaggatacattaggatagtattttactaatttttcaaattgctcgtttgggacaactccaccacaagaagaaatgactccgattctaatttttcctaattcaccctctttaatttgatggatttggcttttagcagatatactcagagcaacaattttttcagcatatttttgaaatacttttccctcttctgttagttctatcccatgagcagttctaacaaaaagctgcacccctacttctttttctaattgttttaactgataacttaaaggtggctgagcaatatataactttttagcagctgacgtaatctgccgctcttcagcaaccactaaaaaatattttaattgtttaatattcattattaataccttttaacttattatctatatttttaatatctcctatcttaatttgatattttcttaataacaagaactgcgctaaaatattttaagaaaatagagaattaacggaggatttttatggaaaataaagaactgcaagggttaaccgatggccaggcagaagagcgtcttaaaaaagatggtctaaatgaagttcccgaacctgaatttaatttctttaaagaatttatgtccaagttatggaacttatcggcctggattttagaaggagccttactattagaatgtattttaggtaaatggatccagtccttatttgttttattaatgcttttatttgcagcgtttaatggagctacacaaaagaaaaagtctcgtagagttttaaatacaatttctcatgagctaactccaatagtctctgtaaaaagaagtggtaaatggaaacaaataaattcaaaattccttgctgttggagacttaatcagcttaaaacgcggagatgttttagcagctgacgtaaaaattgctcaagggcagattacagttgatgaaagctccattactggtgaatcaaaagcaattaaaaaatctgtcggtgataccgcctatgccggaactaccgtagtggatggagatgccctagcagtagtaacggcaacaggaagcaattcccgttcgggaaaaactattaatttaatcaacaattctgctgctcctggtcatttacaacagctattaaccaaaattatctattacctctgtctcttagattgattctgccattgatgaatacctaaaagaaaaagatattagtcctgatactccggaaaaatttgtccccttcacatctgataccggatattcaatggctattgttggtaactacaatattaagttaggttcttttaagcaactttctttaatagataaaaatgctgataaagaagctaaaaatattgattttactgctggtcgttcagttgcagttctaattaatgacaaactagctggaatattcattttacgtgataaagtcaggtcagattcaaagaaagctctagaagaacttaaaaaacgcggaatcaaaccaattatgttgactggagataaccgcagaactgcagaagctgttgctaaagaggttggcttaaaaggaaaagttatctcaattcacgatttcaatgataaaactgacgttaatgatttagccggaattgctgatgttttaccggaagacaagcttaagatggttaaactattccaaaaagatggctatattgtggggatgactggtgacggagttaatgatgctcccgcattaaagcaagctgaagttggaattgccgtttcaaatgctgctgatgttgctaaacgaagtggtaagatggttctcctagaagatggtttaactccaattgttaaaattctggacgctggtcatcgagtttaccaaagaatgacaacctggtcattaaccaaattatctcggacagcagaactaacaatgcttttaacatttggttacctatgctttaactatattccaatggcattaaatgcaatggttatttataccattatgaataatatggtaactatgatgattggaaccgataatacgcatattacctataagcctgaaagttggaatatgcttaaattagctaagattgctttctctcttgctgcaggatggactgtaattggttttggctttgtttggtaccttgtatctcaccactatgctcaaggaactgtttctacaatggtttatgtttatttagttttaagtgcaatgttgattgtattaattactagaactagaaaatttttctggcagtcagctccatcaaaatcagttgctatagttcaaattattgatgtcttgctaacttttgctttagcattattgggtttagctatgactcaaattagctttgcaaatcttggcttaaccataattgtagctttaattgcagcaattataattgatttattctatcaaccaattatgaaaaacaagtaataacccatactaaatccatagaaaaataggttactttgatatgtttatcagagtaacctatttttaataaactttagtttttatatgtttccttaataaacagcacacaaactgctgctaaaatacccgaaattcctgcagtcagcatcatcgccggcattgaatatttcattagtggaaatagtataaagcttaataatgaagcaattatttgaggtaagcaaatggaacaattaaataaacctaaatacgtccccatgtgtttaccggataaggcattagaaaccatagttagtggataagtgttcatagctgcccaagaaattccaattaaaataaatgatacaatcaaaatattttgagaatggacaaagaagatggaaccatatcctattgctcctaataataaactaataccatatccaaccttatgatgatcatttggcacctttgccaaaacatatgaccatatcactgcggcaattgattgaacagctgttaaaaccccaaaccagtttccggctaattgataaccagccgaagatggatctgttactttccaaacattttctgcaattgcacctgtagcataagttgataaatattggaatgaaaaccaacaaaataattgtactaatgaaacttgccagaaaactttaggtgccttttttaacagttcaaaccagtttccgccttctttgttatcttcttctttaataccatgataacgagcataagtttttggatcatattcatgaacttttgttacggttaacaaacttgtaatgacaagtattgtagctcctacataaaatgaaattacaactgattgaggtactacaccctttttagcagtattagcaactcctagaactgttaatagaaatgggaaaaatgctgcaattactgcacctgaatttgaaagcatactttgtataccatatgcatatgatttttgctcatcattaaccatatcaccaatcatcattttaaatggttgcatagccatatttgctgctacatctaaaattgcaattgcaatagctccaaatactaatgcttcaatagagccatatcctaagcctaaactcccaatgtttggcaaaaataacatcataatcactgcaaagatcatcccaattaataagtaaggtaatcttcttccaccaagttttggagcccaagttcggtcagagaatgatccaatagctggctgtaccactaacccagccaaaggcggtaaaataaagaaccaccctagcttagttggatcagctcctaaggtttgaaaaattcgactcatttgtgatgtttcaagagtaaaagcaatttgaatacctaagtacccaaaattaatcatccagatcacactttttgcaagttctggtaagccagatactttgttattttcatccataattttctccctcacttttagctaagcgctttcaataattttatattaagcaagagtgaaaatgctttcaatacaggattaattgttaccggtaactaaatacataaaaatgctgataccattacaaaaaagtaataaatatcagcatttctaaatatttataagtgaggttcctcatattctcttatactctaaaaagtcgtaatcaaatttattatttccatttggatgatgactttcggaatttactaatttaaagtcttcatactttagttccggcatccatgtatcacacttaaatatatggtgaatttttgtcttttcaagaacatctacttcatccttaaattctttaaaaacttcagcaccaccaataatatcaattatttcttcagtgtgatcttcgatccaatttttcaactgttcaatttgtgaaaaaactttaacatctgaattatcttgatatctacgttgtaaaattggattagtagaaaggatgatatgttttcttttaggaagtaatccgggaaaactatcaaatgtttttcgtcccataacgataatatgattactagtcagctctttaaaatgttttaaatcagcgggcaaatgccagggcaaagcaccctggtaaccaatacatccattttcatcttctgcccaaataaatctaatcattgttctgtcctcaacatttaaacggctaccggcgccttaatagtgccatgatgccggtaattaattaacttgatatctttcatttcaaaatcctgtactaattttttatccggatttagccaaagcataggagcgtcatatgcagatcgattcaataattctttaacttggttaaagtgatttttataaatatgagcatcccctaaggtatgaataaattcacccggctttagtcccgtttcacgcgcgactaaatttactagtaaagcataactcgcaatattaaacggtacacctaaaaacatgtcgcctgatctttgatacagttgtaaacttaaacacccgtcattaacataaaactgaaacaagacatgacatggcggtaaagcagacgttggtacatcttcgggattccatgcgctaacaattaagcgacgagaataaggtgttttcttaatttgatcaattacattttgaatttgatcaataaagccaccttcacgcttctgccaatgtctccattgagcaccataaacgtctcctaaatttccatatttttctgcgaaagtttgatcttccaagactttttgatcaaattttttcatttcttcttgatatattcttttaaattctgggtcttgttgacttcttagaccaaaattagtcatatctggcccctgatattcattgctctctacccaatttttaaaggcccattcatcccaaatatgattattatgttctagcaaaaaacggatattagtgtctcctcgtaaaaaccataacaattcgctcttaataagtccaaaaggtatttttttagtagttaaaataggaaagccatcatttaaatcaaatctcatttgggctccaaacaagcttctagtacctgtaccagtcctatcttccttgtcatgcccttcactcattattttacttagtaaatctaaatatggttgctctaaagttgccattttatttcttctttctattccgcgtcctcatcttaaaataccatatattttgtatcttggtaaatacaaacactacattttgtatattcattgatatggtagaattatatattataaactttgggggaattctaatgattttaacttgggatataattagaagaataatcgaaatcctttggttaattaatgtcggtctagcaatttggacagtttttcgtagtcatcgtgatattgcttctacttgggcatggctcttgattttgtctatcttgccttatgttggttttgttttatatttatttactggtcggcaattatcacatgatgatatcttttcaattgaaactgaacagaaaaaaattcgtgatcattttcttaatgaacaaaatagactattaagaatccatgacttgctaccaagtaaagcccagaatccacgcgcaagacgcttagtagaactgaatctaaataatgatgatgcccttttaacttttaataacgaagtcgagacttttatcgacggacaagctttatttccaaatcttataaaaaatattgatgaagcaaagagaaccattaatgtagaattttatacattttatgatgatcaattaggaaatcaggtcttacaatctttagaaaaagcagccagtcgaggcgttaaagttagagttttatatgatgcaagcggctctcgtggtacacgaccatctttttttaaagaacttcgtcaactaggtggagaagctcaacctttcatttcaacagctggaaaccgtctttttactactcctcgcgctaactatcatttacacagaaaactggtaatcatcgacaatgaaattggatatattggcggcttcaatattggtgatcaatatattgatcgaagtaagaaatttggacactggcgtgatacccaccttcgcgtagtaggacaagcagctttattaatggaaattcgctttgcaatggattggaatactagttgccgtaaatctcatcttccaaaatataatattgataacttaattgaaacatttgaattaaaaatagttcaatctaaagacttggtcccaatgcaaattgtttcatcgggaccagataatagtcactttggtattcggcgagcttatgaagaaataattgctcaagcacaaaattatgtctacattcaaactccctacttaatcccgggtgattcaatcctggaagctttaattattgcagcaaaaagtggagttgatgtacgaattatgatcccttctatgcccgatcatccctttgtctaccgagcaactgaatactacgcaaagtacctagttaatcaaggagttaaagtttataaatacgataatggatttattcatgcgaaaactatggttagcggttctaatattgcttcagtcggatcggcaaatcaagattttcgtagttatcaattaaactttgaagtaaatgcttttacatatagcgcagctctcaccaaggaattaaaagaaatttttgaagaagatttaaaagagtcaactttactcacaaaagagtactttgacaaacaatctcattggcgtaaatttaaacaatacttttcaagattattatcaccaattttataaaaaaagagacatcctcaatttttagttgagtatgtctttttttcttatttattcttcttcatcaactacagtaacagtttttctttcttgatatgaataatatatccaagcgataacaccaaatgccactggtccaatagcggtccagaatgaagttgcataatcaccagtaaataatggctcaatacaagtaaagacgatcccgactgctactacaagccaaacaacaattgttacagtccacacacgttttttaccctcaataaagataaatgggcgatcaatatcttttttcatcttaaagaatggatatgcaccaatcagaaataagtatggggcagatgaagaaacattcatcatatccattaaaatagtatagaattgtccggctgcgttaccaccaaaggaaataaataaaataataacactaacaataacagcctgaagccacattgaacgctctggcattccgtgtcgatttaatttaactaaggattttggcaggagttttggatcacatccttcaataaaggacttaacaggtgaataaaccattaaaaatgctgctgaaattcctgctaaaacgtcagctaatccagcaaaacgggaaaaagcagatcctaaagctaatgatgctgaatgagaaagtccaaatgctttacctgtttcaactcccaaattgttaattaaaacatattcaacattagccaaatcaacatttttaccacttaattgactgctccagttagcagctacaccacacatcaaaatatttaaaacatataatgccgtcatccaaatcattgcagtaattaaagccttaggaaacgttttttcaggtttatctactgaatcaatcacaccagctgatgtttctagaccaccgtaagcaaacaaagcataaacaatgaaagatacaacggcaattggagattggaaagccggattaggtgaatgaactagtgattgggccgttaaaggttctgctaactttccatgattcaaaaagaatactaagattgataccaaagtaaaaccaattgtaatggctaaagtaaaaaagcctccaacgttacttacagctgcaatcttatcaacacccttagcagcaaagaatgttacgactactaaaaatgctacttctaaaattcctaaaagttgtgttgatgtcaaatttaaaaagtgccagctttgagtagtatcatggcctgaaatggctgttgataccgatactaagaaaaattgtgtcgatgatacaagccaaaccacccaagcagctaaccaaataaaagtaccgataaaagcagttttttcactaactgagcctttaagccaagaaaaaattccgcccttagctcctttaaaagctgcaccatattcggcaaaaattaaagctgatggtaaaaagaataaaattgcggttatgatataccacacaatacttgcataacccatttggtaataggctgttaaagaattactaaagccaaaaatagctgaaaagatcatcagaactagactctttagcccaattttgactgatttgtcttttttcataaaaaactaaaacactccctctttcatacaaacattaactattatgcgctttttgttaaattaatacaaaagagattaaaaataagcaaaagaaaacggaactcaatcgagttccgttcaagcattaagcatcactgtactttactaaagaatatatgtctaaatctgggaattgttctcttcccttaagatcagttaattcaatataaaatgctgcccctactacttctccgcctaagttttcgattaattccttagttgcgtgaagagtaccagcagttgccatcaagtcatcacagattacaactttttgacctggcttaattgcatctttatgcatttctaagacattagaaccatattctaaatcataagaagcactttctacttcgcgtggcaacttatgaggcttacgagctggtacaaaaccaactcctaattctgttgcaacaggacagccaacaataaatccacgggcttctggtccaacaattacttctgctccacgacttttagcataatcagctaattcatgggtagcagcgcgatataatttcccatcttgcaaaattggggtgatatcgcgaaagacaatccccttatttggaaaatcctgtacacttgcaatgtgttctttaaaatcaattgccatttaaagagaaacctccattttagactctcattgaaaaattagacctagcggtctttgacttgtatattttaccaaatttttgctttaaaatcaggcttaaaccgaactttttaataatttataactagtaatgatcacttcaaatattgtttaacataattaatcaattgatttgatggcatcgttcttaactgattagtaaattttatctgagaggatatactattaaaatattttgaagcagttagttttttactttcgggattcttattcccgataatttttccatcagtaaatgagacaaaattcaattcaaaaaatacacgtaaaataaataaaacagcttgataatctaaaccaagataagaagatacagcctggtaatcatcaatacttaagtttggatgtgcatagatatattttaaagttgcaccaaaagcatccctacttggcaaagtattgattggtaattgatcaaataaaaagcgtaaataaagctgttgatactttttctccaaagcaacatttaactccatttgattgcgtggcgtatctaataaagctactacttcagaatctccattgtaatcttttgctagactaatctttccttctgggatccctaatccattcctagcccacggaataatctttttatcaaaaatcaaatacttatcagcaaatcccatcacatagtcttcttgccgcatatcaattacttgatcaaaaacagctaattttggagctccatattcaatccccgctagcatcccttgaacattcgaaatatttttccagctattaagagaaagagtaacgtaaagttctttaataaaaggaagtaatgtttgatttaaaaatcccttgttaaaaccaacaattgtaagcttccccgcatttttttctgctgtaaactttacatgatttttatcttttcccattttaaatagactcttaatatggggctcactaatactaaaaattggttcaggattacctgttccaaatggaccaaccagattaatctcagctatggtatcaggcgtaacttcttttaaatttaattcaaagtcaaaatcttttacctcaagatcagtacttggtttaaagctatcctcaaagcgtactcgtaattcttcaagcttgtcggcttttaaagataaaccacaggcaaaatcatgaccaccaaatttatctaaaagatcatccttcattggctctagagcattaaacaaattaaatccttcgcttgatcggccagatccctttaattcacctgtttcatccttagtgaggacaagagtaggtttatgcaacttttcgaccactttgtttgctacgagtcctaagacaccttcatgaaaatcaggattataaataactagagtatttcgatgctgccagccattcttttcaacttgagctaaacaatcgtcataaactttacttgtaagttcttttctctcattatttaattcttcaatcctagcggctattttttcagcttgttcttcatcatcacttaaaagtaattccacggctaaactagcatctgccaaacgtccaacagcatttaatctaggtgcaatattaaagccaacatctgttgccgtaatttctcccatagttagacccgcttgtttaatcaaagcgcgtaatcctggtcgttcagtttgattcagaatatctaaaccacgttttacaataatatggccttcaccagtaacctttaccatatcgccaattgttccaatcatggccaaatctaatagctcaggcattgtatcttgcattaatgcacggcaaattgtatacgcaacccctgctccacaataatcatcaaatggatatttctggccaggataattacagtgaacagtactgaaggctgctggtttttgatcttgaaaagtatgatgatcagttaaaatcacatcgacaccatgttcttgagcgtactttatttcttctacaccagttacaccattgtcaacagtaataattaacttagttccatcttctactatctcttgatagcgagtcatgttcggtccataaccatctttaaatctatcgggaataaaaaaatggacatcggcacccaaaatttccaaagtatccatcatgatactagttgctgtgattccatccgcatcataatcaccatagatggttatcttttcaccattatcaattgcttgattaattcgatcaattgtcttttccatatcatgcatcaaaaaaggatcagctaggtcattttcatccgcatttaaccaaaaatctaatttttctgcagtatttatccctcttaaagcaaaaagtttagcttgaatatcagttaaaccataatccttaattaactcttcatctaaattatttgcttgtctttgttgccatttcattattttctagttcacctaaatcatctataaacatctaagtttctattatagcaaaagttaaaaaggatttacttcctttcattaagaagcaaatccctttatttaagcttgaaaacttgaagatttttgtccgttgctggttcttccgcaattaattttcctctaattgcccaacgattaaccccaccatcagcacaagtaattaaagtaacaatattttgcttagtattatccactagccaaactgctgttggatcaacaatttttttcatatatattcgatagacataaatcttatctagattagtcaaatatactctttcacctattttagtgttttctagtggtgaaaataatactcccttagcagtcatatagtgtccagctaacggatagtttccctttcccattacttgatcaggtctcatagttcctccgccagttgacatggcatcgtcgcttaaccctttcataattggtaagtacatgtttacgctgggaaccgcaatcgcgccaattgcatccgctgtattattgacacgcgattttgttacttgaccaaagtcgatttcctctaccttagaaaaatcaaacattccttttttcttttgattctttttaacagtttctttattcaacttttttaaggcagtcgtttgattttgtctaaccatcatatctcggatctgactattgaaaatcatccctaatccgataattaataaaataattgcagcaattctaatgatccaagttttcttggaattatttttctttgtttgtgccattttttctattccttaattaattgatactgttataaattctaacacaaatttagaaaaagaatatcaattaccttagcgatagatttttaacaaaaaagacgtaccaaaaccttggtacgtctataaagttatgttatttatttacctttaatatcgtcatcgttcatttttaaaacagccataaatgcatcttgaggcacttctactctaccaactgctttcattctctttttaccacgacgctgtttctcaagcaattttgcacgtcgatcagggtcaccggtatgaatcttccaagtaacatctttacgatatggtttaatggttgcacgagaaataattttagctccaatggcaccttgaatatcaacttcaaagttctgacgcggaattaatttcttcagcattgttgtcatttgacgagcacgattttgtgcttcttcacggtgtgcaataaagctgagagcatcgataggttctttattaagaagcatatcaattttaactaagtccgttgcacgataaccagttatctcataatcaagggatgcatagcccttagttgaagattttaattcatcaaaaaaatcataaataatttcggctaatggcatattgtaaataacatttactcgatacttatctaagtaatccatagttacaaattcgccgcgctttcgctgacataattccattactggtcccacaaaatcatttggcaccataatttctgctttaacataaggctcttgaacttccttatattcaccagcatcaggcaaatcagctgggttatcaatcagcttagttgatccgtcgttcataatagcatgatagtctacacttggtgcggtcatgattaaatccataccaaactcttgctcaagtctttcttgaacaacgtccatatgaagcaatcctaaaaatccacaccggaaaccaaagcccaaagcttgagatgtttcaggttcaaattctaaagcagcatcattcaattgtaacttttgaagcgcttctttcaaatcatcatacttttgattgtcaactggatacataccagagtaaaccattggtggaatttgacgataacctggaagtggcttttcagttggagtttcagcactagtaatggtatcaccaacacgagtttcacgaactgatttgatgttagcagttaaatatcctacgtccccagcaataagcatatcttttttaactggatgtggacttgaaacacctacttctgttacttcaaattcttttccagtattcataatacgaattttatcgcctggtttaaccgttccctcttcaattcgaacagataaaacaacaccgcgataatcatcatattttgaatcaaaaatcaaagcctttaatggggcattgaggtcaccgtcaggtgcaggtacttttttcacaatttcttctagtaattcaggaataccttgacctgtttttcctgaaacttctactgcatctgaagcatcaagaccaatcatctcttcaatttcatttttacacatttcgggatcagctgatggtaaatcgatcttattaataactggtaaaatttccaagtcatcatcaatagctaaataagtattagccaaagtttgtgcttgtacaccttgagtggcatccactactaagagtgccccctcacaggccgctaatgatcttgaaacttcatatgaaaagtctacgtggcctggagtatcaattaagtgaaagatatatgtttcaccatctttagcgtggtattttacttctacagaatttagcttaatagttataccacgttgccgttctagtggcatatcgtcaagtaattgatttttcatttgacgttcagaaacagtatctgttaattctaaaatacgatctgcaatcgttgattttccatgatcaatatgggcaacaattgaaaaatttcgaatatgtttttgataatcttgtaatttttttatatccatgttctcacccttttcgctttattaattatatcaaaggcctacgactagataaaattcttaatgcaacatttttattgaagtaattatttattacaaaaataaaacgcatacctcaagacttatagagatatacgttttcacttttattctccgtttaacttatcttttaaacgttcgaagaaattcttttcttgtggggaaatattaccgccaccagctttaacgtaatcaaccaaagcttccttctgcttatcattaatcttctttggaataactactttaactgttacttcttggtctccattgcctgtaccatttatctttggtacaccttgaccacgtaatttaaagttagtattaggttgagttcctgccggaatcgttaaatcaactggaccatgaactgtatttacacgaattttatctcctaaagctgcttgagcaaatgaaattggagcttcagtatagatagttgtaccatttcttctaaattctttgcttggtttaactctaaatacaatgtacaagtcaccgtaaggaccaccattttttccagcttcgccttgaccacttaaacgaatctgttgtccattatcaataccagctggaacagtaacttgaagagtctgctttttgtcgacggtgccctgaccatggcaagtttgacatggatgttcaataattgttccgcgtcctccgcacttgtcacaagtagtttgttgttgaataacaccgagtggtgtttgacgagttaccgtcattaccccacttccatgacatttatcacacgtaattggatgagtacctttttcagcaccagagccgtcacaagtaggacaaacttcacttctagtataggtaatatcggtctttttacccttgattgcatccataaagtcaatcgtcattgtataatctaaatcttgacctttttgcggtgcagttggatctacacgacttctgcctccgccaaatgctgaaccaaagatatcaccgaaaatatcgccaaaatcaccaaagccttgagatgagtatccaccttggccgccaaaaccgccaaagccttgaccaccaaagccaccttgaccatttacacctgcttggccaaattggtcatactgagctcttttctgtttatcatggagaacctcatatgcttcatttacttccttgtatttttcttcagcaccaggttcatggtttaagtctgggtgatatttttttgctagtttacgatatgccttactaatctcactttcactagcatttttatcaacacccagcacatcataataatcacgttgtgccatctgaaaactcctttattcataaaagaaaagaactacaatcacgcagttcttttcttgtttgatttaattataaaactttttacttatcagggtctaccttatgaaagtctccatcaacagttgaaccaccttgaccgttgtctgagccattatcattgtttggttgaccaccattttgtgggccttgagggccagcttgaccagctgcaccttgagcaccaccattttgttggtaaagcttaacagctaaatcttgagcagcctttgataaagcctctttcttttctttcatttcatccaagttgttgtctttttgagccttcttcaaagcatctaaagcatcttgaacattcttagtttcagtttcaggaactttaccctcagtttcctttaaagtcttttcagtagtaaagattaattgatctacttcgttacgtaaatcaacttcttctttacgctttttatcttcttcagcatgctcttcagcatccttttgcatcttcttgatttcttcatctgataaaccagaagaactcttaatggtaatcttttgttccttaccagtacccatatccttagcagatacgtttacaataccgttcttatcgatatcaaaagtaacttgaatttgtggaacaccacgtggtgctggtggaatatcagttaattcaaagcgtcccaaagtcttgtcatcagcggccattggacgttcaccttgtaaaacatgaacatctactgctggttggttatcagctgcagttgaaaagatttggctctttgaagttggaatagtagtgtttctgtcaattaacttagtgaagacaccacccatagtttcaataccaagtgataatggagtaacatcaagtaaaacaatatccttaacatcacctgagataacaccaccttgaattgctgcacctaaagcaacagcttcatcagggttaattgagtggtcaggttcttttccagcccaatccttaacagccttttgaactgcagggatacgagttgaaccaccgttcaaaataactttatcaatatcatttacagtcaaacctgcatcacttaaagcattgtcaaatgctaccttagtcttttgaactaaatcatcagttaattcatcaaacttagcacgagttaaatcagcttcaaggtgaagtggaccagcctctccagcagaaatgaatggaagtgaaatgtgagttgaggaaacaccagataagtctttcttagccttttctgcagcatcctttaaacgttgtagtgccatcttatcgttagataagtcaacaccattttcttccttaaagttttggattaaccaatccataattctttggtcaaagtcgtcaccaccaaggtgagtatcaccattagttgataatacttggaagactccatcacctaattgcaagatagaaacatcgaaagtaccaccaccaaggtcgtatactaatactttttcatcattttcatctttatcaagaccatatgctaaagctgaagcagttggttcattgataattctttgaacatttaagccagcaattttaccagcatctttagtagcttgacgttgtgcatcgttgaaataagcaggaacagtaataactgcgtcagttaccttttcacccaaatagtcttcagaaaacttcttaatgtattgcaaaataaaagctgaaatttcttgtggagtatattccttatctccaactttaactttgtagccttcttcacccatatgactcttgattgaaacaatagtgttagggttagtgattgcttgacgcttagctacttctccaacttgaatttcaccatttttaaaagcaactacagaaggagttgtacggttaccttctgggttagtaataattttaggttctttaccttcaagtacggcaacagcagagttagtcgtacctaagtcaataccaataacttttgacatatatggaacttcctttcttattgagccactacaaccatcgctggtcttaatgttctatctttatattgatatcctttttgtaaaactttaactacgcgatcttttcgttcatcattttctgctgccacagtttgaacagcttgatgaagagaaggatcaaaagtttcgccctcggctttaatttcagtaattccttgatctttcattgatttaactaatgaatcaagagtcatctgaacgcccttttgaagttgcttagcagcttcatcatcggctttaacagctaatgctcgctctaagttatccattgcaggcaaaacttctttagccaagctttgagattcatattttattaactgagcacgttcttttgcatagcgcgcttgcatattttgaatctcagcttcactacgtaagtatttatcttcaagatccttatttttagcagttaattcagcaatttctttttcataattctctactggattttccttaacttcctctttcggagctgcttttggatctttttttggtgccttatctggggtcacctcgtcctttaaatctttttcatgcggaaactcttctttactcacagctaacctccttacttaaatctaccataataatctaacaatttctttgctagttcattcctaaaatactcgagtaatccgatcatctgcgagtatggcatgtttgttggccctagtagtgcaattgttcctttaccatatttaccaacactatattgtgcagttaataagctgtaattttcaagtaaatcggatggtaattctgaacccaatttaacctgaaccttagaactagaatcatttttcagttcatcttcaggattaaaaccaatcaaacttgaaagtgcatcattttgatcaattaacttatacagtgattttatcttggttaaatcatcgttttcataattactcaaaagattaatttgaccatcaacatacatttgctcactagccgcatctttaatgacatcttgtaagagatctaatatttccggtgcagatcctcgagcaataagatgatcagcaattcgcttgagtaatacttcattaattgaactaagtgattttccaactaattgatcattaatcaatcgaacagctttttcaatttcttccccgttagtgtgatgaggcaaagtataaatttgattctttacattaccatcatcagtgactaaaatggccatcacttgatgactagatagaggaacaattctaaaacccgtaacttttaccgaatgggtttcaggtcctgctgcaaaagctgtatagttagtcaaatcagataaaatctttgcagcttcctgcacaatttcattaacttgttgaaagggtcggtctaactggtaaacaatttgattatagacagacgttggtatttttactggattaattaaatgatccaaatagtatcgatagccagcagtagaaggaattcgtccacttgaagagtgtgtcttttcaagtagccctttctcttccagaaccgccatttcatttcgaaccgttgcactggagaccttgacaggcagttgattcatcacggtcttggaacctactggctcatgtgtctgagtaaagtccataataatagtctttaaaataagttcttgccgttcagtcaacattttctcgcccccatcattagcactcttctttcttctgtgctaacaatttatatgataccatactttagcaattgttcaagtagagtgctaaatcaatttgatttttaacaaaaaaagcaagtacttagtacttgctcaaatttatttaatcggtagtctgattacagttcttacacgatctactctagttcttcgcggatcacttaaatatatttcatgatgatagcgtggattttttatatcaatttgataattttctgacttaacaaatttatgcatattttcaattgtcgtcggttcgtcatcataactaccaatatgcatttgctggacacatagtccttcgttatatttaaaaaattttactttcgagaaatcttttttcttcttttcactagcagttttaactgcctaatccaactctttaggggtaacaaagtcgggtaaacgaatcattgaaatccaagaaaagttttctttatgagagtagtcgatttttgaatcatccctcatccaccagagaccttcaagaggtggaacaacaaaatcaaaataacctaggattttgtgttctccttttttactcattttaatggtataagcgacactatacagcatttctagagcatttttatatgttccatcttctttatttggatccccgcttcctgaaactgctagatagttcatttcaggaatagttattaattcaggtttcttttttggaaaatataaatctttatattcttttttatagtcaaataccaattttttctcctttaattatttagcttttacatctcctaattttattcgtttatctgtaacctgactaataaaatacttatcatgttcaattaatagcattgccggttgttcttttcttaacatgttaattaactgatcctggttaaacacatctaaataattagctggctcatcccataaatatatatctgcttcttctaccaatgatttggcaatcgccactcttttttgctgtcccatactcatttcttcaatttttgtggcaaagctttctctcggaaaacccatttttctaagaatatttaatagattttcataagatattttttctttttctgcaaactgagataaagtaccagaatattcaataaaattttgtggtaaatatgatatctttaagccattaacaatatcaagttttccttgagaaatcacatttttatctggttttaaaatatttttcaaaaatgtagactttccagatccattttttccttctatagctacaatcccatgatttttaatagttaaatttaaatcttcaaacaatttcttattttggactgtaagatctaaatgctgcgcttctaatagagttccatgatagttgggatgaaagttcatttctaattcaggaatagactcaatatttgtcattaagccttttttatcttgaatactcttatccattcttctttcaagattcttcgatcttttcattattttagctgctttatgactaaagaatcccttattaatgaatgcatggatttcatttttatgagcgcttgcttttttattgttttctgattgaagagaatatccttttactcgctttctactttcgttcaaacttctaatttgaccttgaagtttttcattcttatcttgattaaatttatctcgctttgtctttgtatcttcataactggcaaaattgccctgatacaaatgaatttcggtattttcaatggctaagatatgatttgttacttgatttaagaaagcacgatcgtgactcaccacaatgtagccattagaatgttgttgtaaataagctataacctgcattctggaatcttcatctaaatgattagttggctcatcgattaaaggaaaaccatttttattaataaaggatagtgccaacaaaatcttagtttgttctccaccacttaaagaattaaaaggctgccaaataagttcaggatcaactttcattaaatttaattcgcgttcaagttcccactgttcaaatgaaacctgttcttgtagcgcatataaagctaattgttttttatcattaacagtaagtggaaaatagttaaattcaagtttagcttgtatcttccctgttccccttaaattacctcgtaaaagattcaagaaggttgtctttccccttccgtttcttcctactaaacctaatttccaactactatccaagtctaaatttaaattattaaatatattatctgagctatcttgatatctaaaagaaagatttgaaatattaatattactcatattaatcacctcacgaaaaaagcctacacttttgacaagtgtagactttctcctagttaagcaaaaaaagaagattcccatctacgtttaatcttgtcaaaagtgcacagttgtccttataaaagaaaaataattattaaaattcaactatgctattttgcaagattaaaaacgcaacggcgtaaccttctttcaaatattaaatttcaattgatagaaatattctatcacatagattatataaaagtaaccctaaaattagtttttcaatttataaaaatattgtttaatatcacgcttatcctgatctaattgatgtgaaagttcttctataccagaaaactttttatttttacggataaacttgtaccaggctaaagttagtggcttaccataggcttcttcatcaaaatcaaaaatattagtttcaattgtcaaaccatgatttgttttgaaagtttcattatagccaacgctagtcatagcatcatgccattttccatttacctttgctctagttgcataaactccctcagctggtaaaactttagagccagaaatttcaagattagcagttggaaagccaattttatgtccacgtctgaagccgtgaacaataatgccagaagtttcataaggctggccaagtaactcagctgctagttcaacatttccatgctgaatagcttttctaatataagtagatcccacttttattttatctattgcttgttttggctccaccacaattttaaatctatctttagcaaatttaggtagattttctacattagcaatatctttggggccataagtataatcaaaaccaacgactactgtatcagctttgagtttcattaccacctgatcaacaaaatcttgaggcgaaagctggctaaattctttagtaaatttaataattactaagtaatctactcccagcttctccattttacgctctttttcttgctcagtttctaaatagacaaatttatgatcgtttttataaatttctttaggatgtttatcaaaagtcattaccattaatggtaagtgcttttgttctgctattagcttagcatctttaatgagtttttgatgtccaatatgcaccccatcaaaaaaacctagcgttaagattacctttttagtcgtgataggtgcagaaataggataatctaaggttattactttcattttttactctcactattcattttttaaaagcatcatttcaggacgataaattttaccttgtcgttgataaatagcttttatatgtccattataaaccaaagctaccttggcataagtggtattcaatttaatgcttgctccatttgaaactcttttaaattgatctggtgatatttgaagttggggtaaatctacgaaaaagctatcaattggttgaagccatttttcaggataatctatttctttttcaatagtttctagatctaccgcttgacttaaatcaaaacctgaactgctagttctagtaagactggtcattacagctggaactcccaattcctctcccaaatcatttactagggatcgtacataggttcctttagaacagcgaatagcaaaattaaaactttcagttttttctagtggatcatattctggatcttgagttaattcataactataaatgtttacttttcttttcggacgttctactgggatattttctcgagcatattcataaagtcttttaccattaacacggaccgcagaatatattggaggaacttgatcaatctttccagtaagttttttcattccactaataatttcatcacttgtaaatggagtaactatcttttcttctgcagtggttgttccatctaaatcatagctatcggttgctttaccaaacattccacttccaatatatgactttggtttttcatgcatcaattcaattagctttgtggcttggccaattgcaatcggtaataccccatttacttctggatccagtgtacctgcatgtccaatttttctaatttgtaaaatttttcgtaatttataaacacagtcactactggttactccgcgtggcttatttactactacaattccatttagcattatttaatctccaaaataaaagacgcctttcggcgtctctttcatttatttatttttattctcgcgttcttgatcttgcttcttgacttgattaattaacttatcaatcttagaaccataagcaacagaagtatcacgtttaaaaatcaactcaggaaccttgtaaacagttaaagtttgaccaagcaagtgacgcatcataccttttgctttatcaagtccttcagctacttctttttcctttgctggatcatctgtcaacatactgtagtaaacagtcgcatatgataaatcatttgtacattctacagctgtgatagtgacatcatttaaacgtggatcacgaatatctttacgtaatatctttgtcaattcacgtaaaatttcgccttctacacgaccaattctatgtttcataattaagctcctttttgtgaaaaaagatgcctatttaacaggtacctcttgcatctcgtaggcctcaagttgatcgtcaactttaatgtcattaaagttttcaattgtgataccacaatcaaatccttgcttaacttccttaacgtcatccttgaaacgctttagagatgcaacttttccatcatatttaacaataccatcacgaattacacgaatacctgaatctctagtaacatatccgttatcaacaaaggcaccagcaattgtaccaatcttagataccttccaagtttcacgaacagttaagttaccagtaactttttcttcgtatgtaggttcaagcatacccttcattgcagcttctacatcatccataaccttgtaaataatgttatatagacgaatatctacaccttcagaatctgcttgactcttagcagtattagttggtcgaacattgaaaccgacaataaatgcatttgaagcaccagctaaagtaacatcagattcattaatggcaccaacaccagagtgaataatgttaactcttacaccttcaacttcgatcttttcaagagattgttgcaatgcttctgctgaaccttgaacgtcagccttaagaacaatgtcaacttccttcatgttctctttcttcattgtatcaaacaagttgtctaaagtaacatgttggacattttcacgttgtttttctaaggcattcttagcacgttgttcaccaacgcttctagcagtcttttcatcatcaaagacaactaatttatcagctgcttctggaacatcatttaaaccggtaatttctacaggagtagatggggtagccttcttcactctacgtcccttatcattagtcataacacgaacacggccaaatgtatcaccaacaacaattggatctccaacctttaatgtaccttgttgaactaaaatatctgctactgaaccacggcccttatcaagacgagcttcaattacagtaccaattgctttttgatctggatcagccttaagttccatgacatcagcttgaagtaaaatcatttgcaagagctcttcaacatttttaccagtcttagcagagatcttaacaaagattgtatcgccaccccaatcttcaggaactaaaccatatttcataagttgttccataacatgatcaggatttgcgcctggcttatcaatcttgttcacagcaacaataatcggaaccccagcactcttagcatggtcaatagcttcaattgtttgtggcattacaccatcatcagctgcaactactaagataacgatatcggtaatttcagcaccacgggcacgcatatttgagaaagcggcatgtcctggagtatctaagaaagtaattaaacgatcatcgattcttacttgataagcaccgattctctgagtaataccaccggcttcgtgttcagacacgttagtgtgacgcaatctatcaagtaaagtagtcttaccgtggtcaacgtgacccataattgttacaactggtggacgtttttcttgatgcttagaagctttagattcttccatttccttagtgtataaagtatcaatatcagagatatcttcatgcactttttcttcagcttcaataccatattcagctgctaaaagctcaatagtatccttatctaaagattggttttggttagtcataacacctaacataaatagcttcttaacaatttctgcaggctctctatgaagaagttttcctaaatcttgagcattcatgccttcttcataaactaatgtttctggcaatggacgttcctttctttgagttggttgcttcttgacttctttactttggttgatacgtttattctttttatttctacgacgacgtgccttatctgaatgttcgcttctttcacgttcataatctggcacttcacgtttcttacgagtaaagtctttcttacgagttggctttgtttcttctttttgaggagcaggtacaactggagcgataggctctaccttttttacagtaggtctcttagccttatttctagccggcgatggtttaataatctttggaccaactggtttttgtgaagcttgaacacgagcttttacagctgcagctccttcgagtttttcttcttttggcttacgagtattttccacttttttaacctttgatctttgaggattttgttcttgatgccatttacggcgggaagcctcagtctgagcgtttaattcactagcttcggctctttgttttttcttaaatttatttaataaatcacgtgctgctggtttagcagaagttgtctttttatcttcattctcacgtcgattattttgttgttttttaaaattattatttctgtgcttgttatttccgtgacgattatcatgttcatttttattatcacgacgacgaattgcacccacagaaacctttattttagctttttctttacgacttgaatttttagaatccttttcagtagatggcgtagtattagtagacttcaaactatctactaacttagaaacttgcttatcatctagggaggacatgtggctctttacatcaaaacccaaatcttgtgccttttttacaacaattttgttttcaatgtctaattctttcgctacttcataaatacgttttttagccatcaaatcacactccttcgtttaaattctttatcattgctttgctgaaaccggaatccgtaacagaaactaattttctttcttttccaagggcctgtgttatttcagcactagaaaaagtgtctactagtttgacatctttttttcttataaggaaattcagtttatctttagtattttgacttacatcattcccaataaaaatcaattttgcttgatttttgcttaaagatatttttactgcatcaaatcccgttgctaactttccagctttttgcgctaatccaagtaaatttaaagttttttgtttgttttgcaaaattacttatcaccaaacaattcttttcttgctttttgatgatcaacatatgcataaagatcatcataaaaatcagctgaaactttaacccctaagcttttttccaaaacttgatttttttgtgcttcagcaattttatcaggttctaaagatacatatgcacctctgcctgatttctttccagtcggatcaaccgaaatatttttatccttatcaacaactactcgcaccaattctttttttggttgcatagtatttgttaacaagtctttacgcattggaatttttcttttcttcaaagaaagtcacctattcctcatctttatctgcatcatcatttaatgctgaattaacgtcttctccatttggaaacttatcacttggctcgtcttcaatttgttcagcaatagattctggtgtttcttcatttgagacattatcatttgtagtctcttgatctgcttcaacatcatcaccttcagaatcaacaaattcaacttgtgattcaggtttaatgtcaatcttatagccagttaagcgagcagcaaggcgtacattttgaccacgtttaccaatggccaatgacaattggtaatcaggtacaattaccaaagcattcttatcatcttcatccccgctaaattgaactgcaattacttctgctggattcaaagcattggcaataaaatcagatggattatcttcatattttacaacatcaatattttctccacccaattcattaacgatgttttgaacacgagctccctttggtcctactaaggtaccgactggatcaatatcagaatcattactcttaactgcaatcttggttctatcgcctgcttcacgagcaatggatacaatctcaacagttccatcgtaaacttctggtacttcttgttcaaaaagacgttttactaaatcaggtgctgttctagaaactgtaatttgtgctccctttgaatcagaccctactctagtaaccaagacacgaactttatcttgaggattgtaagtttcacctggtagttgatcattatgcggcattacagcctctacatttccaatcttcacataaacgaagcgattgtcacgtctttcaactgtaccagtaacaatttcatctttatattgagagtactcgctaataatatgttctctttcagcttcgcgtaaacgttgcataataacttgcttagcagtttgagcagctaaacgtccgaagtctttaggagttacttcaaaacgaatttcgtcaccaacttcgtaagcacggttaatttcaagagcatctttcaaacttacttcgagacgactatcttgaacttcatcaactacagtcttaattgcattaactttgaagttgcctttcttttcatcaaaaacaacttctacattttgagcttggttataatttttcttatatgcagctactaaagcagccttaattgcatcaacaataacttcttgtttaatgcctttttctttttctaaggttgcaaaggcttccaccatttctttagacataagtttttgatcatcctttctaaaattcaactgcaaagcgactagaagcaatcacctttctagggattgtgatgtctttgcgtcgtgttttgatctttacttctaagacgatctgatcttgattgagatcttttaaagtaccttcaaaagtcttttcaccatcaattttttgataaagactaacatgaatgtaggatcccttggcacgttcccaatctttttcattcttaattggacgttctaaaccaggagatgaaagctctaaaatatacggttcgggaaaaggatcaggatctaattcatctagtttttctgataccaattcacttaaatttgcgatctcttcaatatcaattccgcctgggcgacgatcaacataaatgcgaagataatattgcttcttttcctttacatattcaacatcgaccagttcatcgcctcttgcttcggctaaaggcgtaactacgtctgccaccaattcggtaacttttgtcaaatctcttcctccgtaataaaaagagtgagcattactgctcactcgaatttgctattcgaacttcgtttttagaatagcatatttactgcaatttgtaaattatcccgctaaaatagtgacaattgattctgatcaggcattccctcaagaacaccattattttcaaaatactccataattgtttgtgatactttgccgcgagtggcaagatcttcttttgaaagaaatttctgttccgcacgtgcagctacaatttgctttgcagcattgtcacctaacccaggaacagcattaaatggtgctaagattgtatggtcatcaataatcttaaagtctgtggcttcagattcgtttacatctaccatcttaatctttattccacgctctaaacattcatttgcaatttcaagtacagtaagtaatgacttgtcttttgcagaaacatccattcccttatcctgaatttctttcattgcagctttaactgtattcttgccgtgactcattgctaccaaatcaaacaagtcagcacgaacagagaagtaagaagcataataaattactggataatatactttaaaccaagcaattctcagtgccatcaggatataggctgtagcatgggctttagggaacatatacttaatcttaagacatgagggaatgtaccaatcaggaatcttatcgttctttttcaagatttccatattttcatcgctaattcctctaccatgtcgtacagattccattgtaaagaaagcaacttctggttttacaccccagtgaatcaagtccatcatgatgttatcacgacaaccaatcacattcttcaacttacaagtcccattattaattaagtcttctgcatttcctaaccatacatcagtaccgtgcgataagccagaaatttgcaataattctgagaaagtagttggttttgtttcttcaagcatccctctaacaaactttgtaccgaattctggtacaccaagtgttcccgtttttgattggatttgttcagaggtaacacctaaaatttcaggacttgagaagagagacattactcccggatcatcaggaggaatagttaatggatcaactccggatagatcctgtagcattctgatcatggtaggatcatcgtgacccagaatatcaaattttaaaatattatcatggatagaatggaaatcaaagtgagttgtaagccaagctgcacttaaatcatctgctggatactggactggagtaaagtcataaatatccatatcatcgggcactacaacaatacctgctgggtgttgtccagttgttctttttactccagaagcaccggctgctagacgatcaagctcagcctttcttaaatgtagttcattttcatcttcataatgcttaacatacccataagcagtcttatcagcaacagtcgcaatcgtccccgctctaaatgaattgtctggaccaaacataactcgaatgtagttatgagctactggttgatagtctccagagaagtttaaatcgatatccggcaccttgtctccatggaatcctaagaaagtagcaaacggaatatcttgcccatctttaactaatggagttccacattttggacactctttgtcaggtaaatcatatcctgacccatattctccattctcaaagaattttgaatacttgcaattcggacaacgatagtgcggagccaaaggatttacttccgtaattccagacatcgtcgctactaaactagaaccaactgacccacgtgaccctactaaatatccgtctttatttgatttggcaacaagcctttgagaaattaagtaaataactgcatatccgtttgaaataatagaattcaattcaagttcaattctatcttctacaatctttggtaaaggttttccgtataattcgtaggctttattataggttaaatccttcatttcttgatccgcattttcaatatgaggtggatatagtccacttttaatcggagcaatttcctcaatttgatcggctaatttattggtattatcaattacaatttctttagctacatcttcacccaaaaagctaaatgcatcaagcatttcctgcgttgaataaaaatgtaaatccggtaaattcttattgcgattagaatttcccttttgagccgctaataaaattttacgataaattgcttcatgcggttcaacatagtgcgagtcactggtagctacgactggtttatttaattctttacctaatttataaatattttgaataatttcatgcagctcgtcttcatctttaattagatcatcttcaattaaggtttgataagctgctggcggttggacttcaagataatcataaaaacgtgctttttcacgagcttcatcatatcctttttgcatcattgaaatgaatacatcgccttgccagcacccactaccaaataataaacctttatgatattttcttaattccgactttggggtacgtggaatacgatagaaatatttagtacttgcaagcgatacaagcttgtacatattttttagtccttcttgatttaaagcaagaacactcatatgacttggcttagctcgcttataaacttgaccatatttagcatagtcattcattttgcctaaatctgcttcatgaaaacgttcattaaaagcatctagcaatttaaacattaagtatcctgtagcttcggcatcttgattagcgcggtgatgatgttcaagaacaacattgtacttcttagctaaagaatcaagggtgtggcgagtttgttcaggatgcaaaagtcttgaaacttcaagcgtgtcaacaacaggttgcgtaatttcttctagacctgcacggcgtaaagccgcatttacaaacccaacatcaaattgaacattatgtccacagagaggacgatcaccataaaattctttaaatttcttaattacatctttttcatcatcagctgcaccaaccatttcatcagtaattgatgttaagttaatcgttgtatcgctcaagggatgatgtggattgataaattcatcgaatctttctaggacctcaccatttttcatttttaccgcaccaatttcaataatggtgtcataaacagaagatagtcctgttgtttcaacgtcaaaaatcacatattctcgattccgataatccatttccgtaggattaagaacaagcaaagcatgatcatcaatcatattggcctcatagccgtataaaattttcattttttcgcttgcaccagtatgataagcttccgggaaagattgcacatctgcatgatccgtaattgcaattgccttttgaccaaattttttcgcagttttgataaagtcactcgccgtactagttgcgtccaattgactcatatttgtatgaaggtgcaattctacacgctttttctctccttcatacttttcttctcgacccttatgttcaattaattctaagtttcgaatattaaaaacaacgtcatgttgatattgatcatcagctgcataaccttgcattctagcccaaacgccaggtttaattccctttagataatcaatttgatctttgtcagaaacaaattttttaaagctaattgaatctgtatagtcagtaatctcaccagtaaaaattacacttccagattttaattcatgaatatccgtgttaaaaatatgtccttcaatagctacgtttccactgccatcttccaagtctttaatttgaataaatttagcttttttatcgacctttttgttgcccattcttgtactcttaacaggcatttttttcttaggttctgccggttgtttttcatagaattcttgcatagcagactcatgctgagcctgctcttgttctagacttcttaaattttcatcaatattagtttcatcaactttcgttgtaaacttgatattaaagaaaccataacgtctgaattctttatttagttctgctaaaacttgttctgaaagcaagccatttactacttggttttgagtgggaattagccatttttctttttctaaataaggagcttgtccttgtaaaaattcccgaaccgctggttttaggttagttgaattctgaatggcataagtccagtaggccggtagttttttactacttccatcgcgtgtttgaactaataattcaacattcacaaatggttcaaaagtctcatgaataagttcattaagagagcgataagtttcaaaatctaatggtgtatcaaaaaaaacgtggattttccactttctttcattagcgtatacatccacgttttcaatttcaccattttggacaatatcgttatcttcaaacttatcaggaaacttgatttgatctaatagttttttgaaaagttcgttcttttttgtcacaaaaattatcctaactcttttgtaatcacagcatccaaatcagaaatattaacttcagtagccttttcatccattggacgctttacttctacaataccatcttttgcttttcgaccgattgtaattcttaatggtgctccgactaagtcagcatcattaaatttaacacctggtcgttcatttctatcatcgtataaaacatcatacttggctgaaagttctttttcaagtttttcagctaatttagtttgagtttcatccttcattttcatttgaattaaatgaatggcaaatggagcaatttcttttggccatgcgattccattttcagttaagtgttgttcaactgcagctgacagcattctggttaccccaattccataggagcccatgattactggcttagctttaccattattatctaagaaatcagcacccatagtatcagtatagtaagtacctaatttaaagatatgaccaacttcaatactagtagtaaatttcaatggtaaatgatcaactggatctggttctccttcgtttgccgtacgaatatccgcaaattcgtcaactttaaagtcgcgatctaaattagcattttgatattgatagtcggtttcatttgcacctacaactacattgtacaaatctttgactgtttcatccgcaataatcttatcagcccagtcagcattgattggtccaacgccgcccttttctgaaccagtaatttctactaattcatcagcatttgcagttctaacttcatctgcatctaagatatgacctaatttaacttcgttaatttccttatcaccacggatgagaactaagaccttttggtcatctgcaatgtataagatactcttaacaattctagttgaaggaactttaagaaaatcagctaacttttcaattgtatccattcctggagtggctactttagctaagtcttttgcttcttctggttcttgtttaaaagtatcaatacttttagccatttcaaggttagcagcgtaagtgcctttttcattagtagcaattgtatcttcaccaattgcagcaggagcttgaaattcagttgagttctttccacccattgtacctgaatctgcaataacagggtgaacagtaacaccagcacgattaaagatctttaaatatgcggatttttgatcatcgaattgttcatctaattgttcacgagttgctgcaaagctgtagccatctaacatgacaaattctctaccacggagcaaaccgaaacgtggacgattttcatcacggaatttagtttgaatttgatatagagcaagtggcatttgcttgtaactctttaagttcttagcaacaatttcggtgaaggtttcctcatgtgttggtccaagcaaactttcacgtccatgtcggtcttgaagcttaaacatttctgcgccatattttttataacgaccagattcttgccaaagggttgcaggcaagagatgaggcatgatcatttcaggtacattaatattatccatttcttcttcaataatattttccgccttgcgtaggacgcggtaacccaaaggtaagtatgcataaaccccggcagttacttgacggatatagccacctctaagcattaattggtgactttttgctacagcatcagaaggtgcctcttttaacgttggcataaaaaattttgattgacgcatttattcctccaaaaatttacttaataaaatagcgataaatatcatttccagttactgcaacaattaacagtaagagaatgacaaaaccgattacatctataattgcttccttatcttcaggaattggttttcgaataatgagctgaatcaggttaagtaataattttccaccatctaatccagggattggaatcaaatttacaattcccaaattaatagaaatcattgctaaaaatgctagcaagtatgtaaagcccatgtttgaaacttgaacggtttgcgaataaattcctaccggtccagaaagcttgttcaaactaaaatgtctaaacaaattacctacagcattaaagattaaaccagttgtactaatacttgtattccatccacggctaatttttgcaccaagactattatcaggctttccataaaaaccaagttgatagactttttgaccatctatcttattagctttaggctttatggagaaatttttaaccttattatctctttttacctttacttcaacagtcttacctttactttcagctagttcagcagcaatttgattgaaattactaatttttttattattaatcgcgataatttcatcattagctttgatcccagctacttgagcaggttgatgagcaatagtgctacctactgttgtagtcggtgcaccaggagctgctaatgaccaaataataaatacaacaaatcctaagacaatattcatgaatggaccagcaaaattagtagctagttttttaccaacactagcctcttgaaattgtgtatctcggggtgcaattaacaattcagttccattttgctcaatgatcgtggcatcatgatcaacagaataagtttttagctgatcttcatcaccattttcatatccttgaatagttaatgcatctactaaatcagcggcattgacttgtactggaattccttcaattggcatttgagatcctgatgcatcaattcgtttaactttattttgatcatctaactgcaatactactgtagtaccaggatcaatctttgcggcatcatcaggtcccgctaagcgcacatatccccctaaaggaagccatctaatagtatatgtggttttagcacgcatcttttgaaacaattttggccccataccaattgaaaattcacgaactaaaataccgcacttttttgcaacaataaaatgtccaaattcatgaacaaaaacaagtatcccaaaaacaactagaaagattaaaatacctttcattcagtagctctcctataaaatacccataaatgcaacaacaggtaaaacgaaaagcatgctatcaaatcgatctaaaattcctccatgaccaggcaagattttacctgaatctttcacaccataaaagcgtttataagctgattcaactaaatctcccatctgaccaacaattgataagaagaaggctagaacaatcatcatagcattattcctaccagtaggaactaaggtaacataaattgctgcgataattactgcacaaattactgctccaatagatccttcccatgttttattaggactaataactggccataatttatgctttccaatcttacgtcccaccatatacgctgcaatatccgttgaccaaacaactgcaaatacatagcctaaaattgctaatccaagatgggcatttctaatagcggccatgaagtgaaagccagttccgatgtataaggcagccaaagtataaactccggcatcatcaaatgtaaccttattcttagacaaaaccgttcttacgagcatcaacattacgaagatataaaaaatatcatacttatttaaaaacgcaggtaaaaatttaaagaatgaatcggggactgccatagtcaaggttgctaataaggccaagataaaatcccaagaaacaataatttgcttcttcataataaaaatttcgctaattccaactgctgcaaacgcacaaactaggacatcaatccaaatgccgcccattaaaacaatcggaataaataaaattaaagctacaatagctgttattacacgttgtttcatttaaaattctacagttctaattaaaattatacttttccaaaacgacgattacgtccttgataatctttaactaattcttctaaatcagttttatcaaaatctggccataatttatctgaaaaactaaattcagtataggccatttgccacaataagaaatttgataaacgttcttctccagatgttctaattaataaatcaggatcttcatatggagctaaagaatgagtcagcaaatgatctgagaccattttttcactaatatcatcaatatcaatttccccgacttttaccttacgagcaatttcttgtactccagccgttatttctctacgcgatccatagttaaaggcaaaattcaataccattcctgtattattagctgtttctgccatggctttttgggttactaaatatgtcttctcaggtaattcgtctacaaatcccatgatattaacccgaacgttattttccattagttccggcataaacttatcaaaaaagtcaattggtaaacgcatcaaatagtttacttcgtcagtcggacgagcccaattttcagttgaaaaagcataaagtgttaaaacttttattcctaatttattggcggcaagagcaatatttcgaatattatccataccatgacgatgtccgacaaaacgtggtaaatgtcttttttttgcccatctaccatttccatccataattatggctaaatgattaagtggtttttttgattctgacatatcttatcaagtcctaaactaaccctgagtaatttcttgactcttttgatctgctaatttatcaatttctttagtagcatcgtcagttactttttgaacttgtttttctaaactacgttgttcatcttcagtaatatcgccatctttttcttgacgcttcaaagtatccattgcatctcgacgaacattgcggacagcaatcttacctttttcagcaagcttgcctacttgcttagcaatttcttgacgacgttcaccagttaattgcggaataacaattctaattacagtaccatcattagctggagtaattccaagatcagaagctaagatagcatgttcaatgtcatctaaagttgatttatcataaggcgttaccattaaaacacgagcttcaggaatacttacactagacatttgtgtaagtggagttggaacaccgtagtagttaaccttaattccatccaataagcttgcatttgcaacgccggcacgaataccacctaattccttttggaatacagcgatagactttttcatattatcttttgctttttcaattacttcattagccattatttatcacctttgattacagtaccaatattttcacccataacaactttcttgatgttaccaggcttatttacattaaagacaactagtggaatattattatccatagacaatgaactagctgtactatccattacttttaagttctttgaaatcaaatcaagttgagttaattcagagtatttcttagcatttggatcaactttaggatcagctgagtaaacgccgtcaactccatttttagccatcaaaattacatctgcattaatttcagctgctcttaaagctgcagtagtatcggttgagaagtaaggattaccggtaccaccaccaaaaataacaacacggcccttttctaaatgacgaacggctttacgacgaatataaggttctgcaatttgacgcatttcaattgatgtttgtactcgtgttggaacgcccaagttttctaatccatcttgtaatgctagaccattcataattgttgctaacattcccatgtagtctgcctgagctctttccatacccagatttgcaccagtttcaccacgccacatgtttccaccgccacacacaatgccgatttcaacacccatatcgtgaacagacttaatttcttcagctagatgcttaataacctctgggttaataccagtacctttttcaccagcaagggcctcaccagaaacttttaaaataatacgtttatacttaacttgactcataaatttacctcctcattgcttttatcattttaccataaaatcactgcaatatattataccgaaaaaaaggagcaacgcctaagcgttactcccatttttaagtaaataattacttcatttgttcacgtacctcggcagcaaagtcttcttgcttcttttcaataccttcgccaacttcgtaacgttggaaagcaactaacttagctcccttttccttcaagaattcgccaacagtcttgctgtcgtccataatgtagttttgtgataaaactgcaaattgcttatcaacttgagtattatcatcaataaagcgttgcatcttaccaggaataatcttatcccaaatcttttcaggcttaccttcttctttaagttcagccttaatgtcttctttagctttagctaaaacatcatcgcttaattgtttttctgaaccataaacaaggtgtggtaatggcttcttgtttaccaaagcacgactttcgttatcttgatcaatcttgtggttcataacagctaattgatcagtgatgaattcatcatctaattcatcaggtgagataactttaggactcatagcagcaatgtgcatagctaaatgcttagcagtagctgcatcagcaccttctaaaacagtgataacaccaatttggccaccattgtgttggtatgcaccaaattcttggtcatcagttttttcttctaaagcgaaacgacgtaagacgatcttttcaccaatagtagcagttgcatctacgaatgactgacccaaagtagtaccatcagccatctttaattcttcagctgcttccatgtcagcaggtttaccttcagcaatagttttagtagcttcattaactaatttaacaaacttatcgtttgaagaaacgaagtcagtttctgagttaacttcagtaatagctgcaacattaccatcaacgtaaacgccagttaaaccttcagctgcaacacggtcagctttcttagcagcctttgccatacctttatcacgaaggtattgaactgccttatccatgtcaccgtcaacttctactaatgctttcttggcatccataacaccagcaccagtacgttcacgtaattctttaactaattgagcagtaatttttgccattaatatgtcctcctacagaactaacagtaaaaacaaattagtcttctgatttttcaacaactacttcgatggattcttcttcatcgtcttcagctgctgctttatcagccatttctttttcaacatcttcgctgtcatcttggccttgcttaccttcgataattgcatcagccatagcacctgaaatcaaacgaattgcacgaattgcgtcatcgtttgctggaataacaacgtcgattggatctggatcagtgttagtatcaaccatagctactacagggatacctaaaatgtttgcttcgtgaacagcgatcttttctttcttaggatcaacaacaaacataacatctgggattcttggcatatcttcaataccacctaagaatctttcaagtttttccatttccttagtcaaaagtgcaacttccttctttggtaatacgtcgaaagtgccatcttctgacatttgctttaattcctttaatctcttaacacggctttggatagtagtccagttagtcaaagtaccacctaaccaacgttggttaacgtagtattgacctgcacgtgtagcttcttctttaacagcgtcttgtgcttgtttcttagtaccaacaaacaagaatacgccaccgtcttgagcaactgccttaacgtagttgtaagcgtcatctaacatcttaatagtcttttgtaagtcaatgatgtagattccgtttctttgagtgaaaatgtaaggagccatctttggatcccatcttctagtttggtgaccaaagtggacacctgcttcaagcaattgcttcatagtaacaactgtcataaaaaattcctcctggttaattcctctcaagaggtcgtattaaattctgaccaataaatggcacctaggaatttaatcgctcttgatgtgatataaatttaatatgcgaaacgcatacttgaacattgtaactaattaattttataaatgcaattaaaattttacattatgttcttttaaaaactcttctttccattttcttgaatggtgtttgaaccaatattctctctttaaggccagttttttatcatcaagttcttcatgataaatcatttttactggtcgacgtgtttttgtgtatttagctccttttccttcattgtgcatctttaatcgatgagctaagtcatttgtaaaaccaccatagaaacttccatcattacacaataagcagtaaaaataatatttttcttttttaggcccttcttccttattttcagtgataactttttttatttcaggtgtaaacgatccatcttgattatgaacaacaattgcatccctcaaaactagaccatcactcgcagtatttctaattgcttctaccacaactaaattagcatctgcctctctcttagagacaaatggttgcacccactttacactcagttgattttctaaacaatagtgcataatttcacccaaacgctcaggccgatgaaccataaacattttgcctttcatcttcagcagatcacttgatactttaattatttgctcaaggttaattgctagttcatgtcttgctaaggcctttttttcatctggattaacaatatgacctttaggaactttgaaataaggaggattaacaacaactacatcatacttatctttacctaattttttcggggcatctaatgcattcagacaatggacttctatccgattttctaatttattcaatttaatacttcgtcttgcctgatcagctatttctttttgaatctccaccgcatcataatgtgcccggttaaaataggacaggtagatactagcagccccattaccactacataaatcaacaactttataattatcatgtattttattttgcgcaaaatatccaagaagaagcgtatctaaagaaaaagaaaacgcatctttttcttggatgatttgtaggtcatcattgtacatataatcaattcgttcattaggtttcaatagatccattttctatacccttctaaaaattctttgctgtattgtataatactatagataaaattggaggaaagattatgttttataaaattattcgcccaatcgcccgatttattgtctgggtacttaatggacatttacatgttcatcataaagaccgtataccaaaaggtaactatattttagtagcccctcatcgaacttggtgggaaccaattctttttgccttggctgcaagtccaatggaatttatgtttatggcaaaaaaagaactttttaaaaatcctattttgagatttattttagtgcatgcacatgctttttcagtagatcgcgataatcctggtccttctgcaattaaaattcctgttaaaggattacgcaaaggtgatctatcgttgattatttttccttccggaactcgtcattctgaagaacttaaaagtggcgcatttgttattgccaaaatggctaataagcctttagtgccagttgtttatcaaggaccgttgacctttaaaggcttcctaaaaagaaaatccttagacatttgttttggtgatccaatctatattccacgccgcgaaaagattaataaagaaactacacctgctctataccagcaattggaagaagcttgggacaagctagataaagaacaaaatcctgactttcactatatcgcaaaataatttttttattattcaagatttttagtgttaaaatgacatagtctagtgtagaaaaggagaatcgataatgttagaaaaacctttgtataaaatgatgcttagtcattcatttaatgtccctgtaaaagttacgtactgggatggaaaatcagaaatttatggaaatggcacaccggaagtggaggttatttttaacaaaaagattccttttaaagaaataacaagtaacgcctctttagctttaggtgaagcttatatggataaggaccttgaaattaagggtagtatccaaaaattaattgaagcagcatatgaaagtagtgaatcatttatgcgtgcttcaaaatttagaaaatttttacctaagcaaaagcatactgagaagcaaagtcaagaagatgttcaaagtcactatgatatcggtaacgatttttataaactatggcttgatccaactatgacttactcatgtgcttacttcactaatggtaataaagatgatcttgaagctgctcaaattgctaaagttcatcatattcttcaaaaattagatcctaaaccaggtaagactttattagatattgggtgtgggtggggaaccttaatgctaactgcagctaaagaatatggacttaaagttaccggagtcactttaagccaagaacaatttgatttagtcaaccaaaaaatcaaggacatgggtcttgaaaatcaagccgaagttttacttgaagattaccgtgaattaggtaatcgtgattttgattatgttacttctgtaggtatgtttgagcacgttggttcagaaaacctaggagaatacttcaaagacgttgctaaatacctaaagccacacggtgttgctttaattcatggtattactcgtcaacaaggcggggctaccaatgcctggattaacaaatatatcttcccaggtggctacatccctggcctagtagaaattgtctcaagaattgaagaagctaacttacaaattgctgacatggaaatgcttcgtcgccactatcaaagaactcttgaaatttgggataaaaactttaatgaccaccgtttagaggttgaaggaatgatgggcgaacgctttgtaagaatgtgggatatgtatcttcaagcttgtgcagcttcctttgaatcaggaaacattgatgttattcaatacctattaacaaagggcccatctggtaaaaccttaccaatgactcgtcaatacatgctgaatgataaataaaatataattcaaataaaagctcggtcttaaacgaccgagctttttatttatcgctattttgttgaagcttataaagattgtagtaataccctttcttcttcaatagttcctcatgtgtaccacgttcaacaattcttcctttatccaaaacaataatctggtccgcatctgcaattgttgaaagacggtgcgcaattgccaaagtcgttcttccttgacgaagcttctttaatccctcttgaattaaattttcggtttctgtatcgacattagccgttgcttcatctagaactaaaattttaggatcagttactaaggttcgtgcaaatgaaattaattgtcgttgtccttgactaagttctgatccaccttcaatcacttttgcatgatatttaccaggcatcttttcaataaatgaatctgcttgtacggttttagcagcatctttaatttgttgatctgtaattttgtcattatacaagcgaatatttgaagaaatgtccccatagaacataaagggttcttgtaaaactaatcctagttttttacgtaattctttctttggaaacttcctaatatcaatgccatcaataagtacttccccactaccaaattcataaaatctcatcattacattgataattgaactctttcctgatccagtatgaccaacaattcctaaagtttcacccggattaactacaaaagatacatcatgtaagatttcattctttccatcataagaaaagctgacatttttaaattcaatctttccttttgaaataactgctctttcatcattttcttgtcgcggttcgtattctttttcatccataattctaaaaatacgtttacctgccacaatcccatcctgaaaagaagtcattcgatccatcatagtagaaataggattaaaaaattgttgtacatattgagaaaaagcatatacaattccggcaggaacaaaagtctcttgcaatggaaaaccaaaatacattaacactaatgcaagagccaatgaataaagcaaactagtcattggcgagagcaaaagcgagttaactcggatcaagttaaaacgtgttctcattaaagtaccattctcattttcaaaatggtttgtcattcttttttcctgcttaaattgctgaattagagaaactccttcaatagattcatttaagttagtattaattcgactaagccgttccctaaaagcacgatacaatctagaactcttttgtgtataaatccagaaaataaaacctaaaattggtaaaaacagcaagacaattaacgccgcaaatttattggttacatacatcgctataaaagcagttactaaagaaaatactccaatgactacttgacaaagtactcctaaaaagtcgcttagagtcatcgtatcattagtgactcttgatacaattgaacctgctggggtctggtcaaaatagcgcatccctaaactatgaagttttcgatataaatcttttcttacactttcaagtgttttttcagcgccaagtgcatataaatattgatatacaaattgaagaattgccttaataattgttccaagtccatataatagtccagcccaaactataatctgtaccgttgctttttgtttgatcaaataattatctaagaaaaactgtagtccccttggtaaaagcatattaattacacttactaagaaagctccaaaaattgcaattcccattccactttaaaaggctttacgtactttaaaactcttttaaatatttgaacttgttctttaaatgggatggccttagaccaaactgatttgctttcttcattcttgtccatctacttcacccacctttgcttgtagttcttgtttacgccacatttcagcataccaaccattttgagctaaaaggtcagcatgttttcctctttcaacaatcttcccctcttttagaactaagatgagatctgcatccattacggaagtcaaacgatgggccgcaatcaaggtcttttttccttttctttccgatttaagtgaatccaaaatagaggtctctgtctttgcatccaccgctgaaagagcgtcatctaatatcaaaataggactttcttttaacaaggctcgtgcaattgacaatctttgtttttgtcccccagacaaagatactccattctcacctaccaatgttttatacccatttggcatttgcaaaatgtcatcgtgtaaatcactcttttgagctgcagattcaattttatccttctccacattttcatcagaaaaagcaatatttttttcaatggaggtagaaaacaagaaattattttgtggaacatacgaaatttcacttaaaagtaattttaaaggagtatttctaatatcatgaccacctaagcttattcttccttggtattgatcaaactctcttaataaaagctcaataatagtggtctttccggatccaacttttcccactaaacctaatgtttgtcctggttttaatgtaaaattaatattttgcaaaactggtatttctttttcatcaggataggcaaaggatttaatttcatattttaaatcaccttgaatatctcgagctgttaagctctgatcagcgttttcatcagtaatttgaggtttctcatataatagacgttcaacacgatcataggaggctgatccacgctctaaaatattaaataaataaccagttgcaaacatcggccataccatattagaaatataagcaataaaggaaaccaattgaccaactgataaagtatgatttgataccagtaacccaccatagataatcgtaattacataagttgctccaataattaatgtccctaatggatcaaacattgaatcccatttaaaaactttcttattgatttgaatggtatcatctaccatcttattaaaggcagctgaatcctgctcactttcaccaaaggcttttaatactttaattccggaaactgattcttgagttttattatttaaacgtgaaaatgcagcttgtgatttgtcaaaactataatgaagcttatctcctaacttccaagcacctaaagcaagaaaaggaagtggtaaaagggcaataatagttaacctaaaatcggtaaaaataatcattgcaatcattgtagttccaccagtaaccaaagagtcaactaaagtcaaaactccatctccagctacattttgaatggaattgatatcattagtcgcatgtgccattaaatccccggtgcggtgcctttgataaaaagttttatccattatcataaaatgcttgaataagcgggatcgcatttgtctttctaactctgctgctccaccccaaatttgcttacgccaaaagtagcgcaataaatataagactatagctgcagcaatgacagctaaaattaaggcactatactcaccccagctaattgaccctttatctagctggtcagccatcagtcccaaaattctaggtgggactaaattggcaattgaagttaaagctaaaaaactaataccaataatatatcttttcttctcttgcttaaaaaaccatcctaatttgctaaaaatattcatttttcaccccaccatatacaaaaagacagaggaatacgatcctctgtctattaccaaatattagtaaaggaagctactatttttgttgttgatgcttcatcatattcataacttgattaagcttcttagcagatggtttttgtcccatttgcgccatcatagctgcaatcatatcttcactaataggaggattgtcttggaaatacttcttcatgtatgcgcgagcaccataaaatccgccaacaagaccgattaataatgcgataataataagaaaaattgctaaacctaaattcatttcccaaaaacctccaaaaattaatgtactttttcagcataccaaaaaaatagtattttttaaagtaaaatattaatcttttcttaatcctttacgacgttgtgcctctttagctttttctgaggttacttctttaccatctttgtcaatgactacagtatcctctaattgttgtctaaatccagcacggaagttttctagaaaagcagatcttaattttttacgttcctctaactcatcaggagttaattcacgttctctactaattttagttaattcattgattcgtttaattaaattttcttcttcttttttgtccataataaacacctcactaaacaatgttagtttaccttaattataccaataaaaaaagactcaactactaagaacgcctgtttgccgagataatatttttttgttagaatactaataagtaagtaaatggagaaaaaattatgactgaaccacatgcaaataaacaattagaaattttacgttttatttacgatactgttgaagaacgagcttttcctcctacagtgcgagaaatctgtagcgcagtggatctttcttctacttcaaccgttcacggtcacctagcacgcctagaaaagaaaggctatattttaaaagatgccactaaaccaagagcaatcgaagtaactgaaaaaggtcgagaagctctgggaattaaacctaaagatattcctgttgttggcgtagttactgctggtcaacctatcttagctgttcaggacatcgatgagtattttcctcttcctcctgatctcgaaaatgatgctggcgagcttttcatgttacgtgtgcatggcgaatcaatgattaatgctggaattttaaatggtgatcatgtcattgttcgtaaacaatctagtgctaataatggtgagattgttgtcgctatgactgaagataacgaagcaactgttaaaagatttttcaaagaagatggctattatcgtctgcagccagaaaacgatacaatggatccaattattttacctgtggttcaaattttaggtaaagttgtaggtctatatcgtaataatattgattaaaaaatggtaggaaatgtcattcctaccatttttttgctatttaattagcggttttacatttaaccagtcttgcgcaattacttcggctaattttctattataaaaaacagctgcgggatggtattgcggtacaacgatatacttttctttagaccaaatataaccatcttttttatcatttaattctaaaattggagtattttcaataatttttccatgcacattactaatttcatatttatcatctagcaatcttgttagagccgtagtacccactgttacaatgattttaggtttaacacacttaatttcataatctaaaaatggtgcatgtgccaaaatttcctttttagtcggttttcgattaggatatttgattacttctttattttcttttttactaaatgtgtgcttaatactataaggacggcttctgacagcactagttatatatacatcgtctcgtttaagcccgattgaggctaaagatttcattaattcttttccagacgcaccgtgaaacgggattagcgactctatctcttctcttcctggcgcttctcctacaatcataagcttgggatgaactggaccagcaccaaaattaattccttccaatttcatcccctttgatctttccttaacttcagctaagagtttatctggatatttcattttcaatatattcctgtgccttcttcaataattctttcaattcttcataatttaaacaggaattagcttctgctaaagttgcccatttataatctccaatttcacttttttgtagttctattttttgacccgggttaaatctactcaaaaacaatgttacagtttttaatcgatcccgggcaattttataagtaatactttcctcaaaatcaaaatcataatctggttttagtcccacttcttcatagacttctctttgagcagcctgtacattattttcatccttttctagatgccctttcggaaagccccaagttcggttaagtctactttggacaagtaaaaattctattttattatttttaatacgataaacaatactaccagctgaatattcctgcatcttttttactcccttcttatgattgttcttgttgttttcattataagctaaattaaaattttcgaccccttcaagacctttatcttgtatttaattatataaattaaaattatttttcatcttttttgtttaatcgacaaaatgttaatttagggttacactttatgttgaagtagattaaataaggtgaaaaaattgaaaaaacaagaacaatctgaaagctggggtcagtggattctccaggtactaattctaaccgccatattttttggtatcttctttgtactaaataaatatgtttttgccaacttaactgtatctggaatttcaatgcaacctacttttgaaaataacgatcgtgttattgctcttaggcatgccaagattaaggaaggcgacattgtaattgttgatgcgcctgacgaaccaggagccgtatatattaagagagtaatcggattaccgggagataccattgtaagtaaaaataatcaaatttatattaatggtaaaaaacttaatcaaccatggttaaaggctggccaaaaattaattgacaatggagaggacggaatctcaggtactaaatatactaatacacaaaatttcactctgagttctctagctaaaactcaaaattatcgtcaattttatacttcaaagcaactaaaagaaatgcaaaagactaataaagttcctgctaatacttattttgtaatgggagatcatagaagcgtttctaaagacagtcgctatattggaacaattccacgaagtaaaattgtgggagtagtaaagctgcgctactggccactaaatcacatcacattttattaatcaaaaagagtttcttttttgaaactctttttttatctacaaaaaaagccatctctttcgagatggcttttaatactgtcttgattaattgaattaaccgcgacgcttttcagcaattctagctgctttaccgtgacgttcacgtaagtagtaaagcttagcacgacgtacacgaccgtgacgaagaacttcaaccttagcaacacgtgggtcatttactgggaaagtacgttcaacaccaatacctgatgacatcttgcgtacagtgtaagttgcgctgataccagcacccttacgcttaattacaacaccttcgaacatctgaatacgttcgtgagtaccttctacaacacgtacgtgaacacgaacagtgtcacctgcacggaagtcaggcatatcatcgcgtaattgttctttagttaattcttgaattaatggatccattattttctctccttctacggcattcatcaacaccttgtgccagcggaatacccataaatcagtggcttatgccacaacgactagtttaccaaatagaaaaatgcttgtaaatactaattctctttttcacttttaatttcttcaagcattctcttttcttcatctgttaactcacggtcagctaacatatcgggacggtagagatatgttgctcgtaaggcttccttatggcgccattcagcaattttttggtgattgcccgatgttaatacttcagggactttctgaccttcaaaatcagcaggacgcgtatattgcggatattctaaaagaccgtgtgaaaaactttcttctactggagaagcagaatttcctaaaattcccggtaagagacgaacagtagcatcaatcatactcattgttggtaattctccaccagtaaggacgtaatcgccaattgatactgtttcatcagccaaatcatagattctctgatcaaaaccttcatagtggccacaaataaaagttaaattttcttcttttgaccaatcttgggccattttttcattgaaagtttttccctgtggagcagtaataattacttttcctttattagttaaagaatctagagctttttttattggcataatttgaagtaccatcccagctccacccccataaggagtatcatcgacatgatgatgtacgtcgctagtaaagtcacggaaattaactaagtttaattcccattttttgtcttctagacctctccccaacattgatacctgcaaaggagtaaacatatctggaaaaagggttaaaacattaattttcatctcgtaatccttcaagcaaagttacttctattctcttattggctagatcaacttttttaactactgattcaatatttggaatccaaaaactctttcctttttctggctttatctcccaaatatcattagcaccaggagtttcaatgttttctaatactcctagcttttctccagtctcagcatcatagaccgggcaatttaagatgtctttaaagtagtagctaccttcaggtaattcttgttgatctgtttctgctacatataattctttactgcaaattttttcagcttgatcaatatcatcaatcttttcaaatttaactaaataaaattgtttatggcgtcgagtattttctacaattaattcttcatactgtttattattcttaataaacaatctacttcctgtagctaatctttcctctggaaaatcagttgttgcatttaccttaacttctccctttaatccatgaggagacaatatctttccaacttcaaaatattcagtcatagaacttattctttctaaataaaaaagtttgggaagagctttcccaaacttctaattgcaatagtaaattacttaccgtactttgcgtcgtggtatctagtcatcaaaccagcttttgaaagtaagcttcttacagtatctgatggttgagcacctttttcaagccattcaaaaatcttgtcttcttcaagcttaacttcatcagggttagtaagtgggttgtagtaaccaacttcttcgatgaaacggccatcacgtggcatacgtgaatcagcaactacaatacggtaaaaaggttttctctttgagcccatacggcgcatacgaatcttaacagacattaattaattcctcctaaatttcttgacttaaataatatagcatatagaaaaatatgtgtaaaggggttttccttaacagttgaaaattattttgaacgataacgcttaatattcttcatccgtttcttcttatttttcttaaagcgcttattcattgatctcatcgccatcttgcccattggtgaattcattcctggtaagttagccaattcacccatatcacctttggtcatcttttgcatcatttcttttgattgcttaaattgtttaatcattcggttaacttcagcgatcgatctaccggaaccagcagcaattctacgtcttcttgacggattaagaatatcaggattttcacgctcttctggggtcattgaataaacaatagccttaatgtgatcgatttgtttttccggaatctgaatatttttaagagcaggattattacccaatccagggatcattttaatgatttgatctagaggacccattttttgaacttgctccatttgatcaataaaatcattaaaatcaaaagtattttcccgcatcttttcagccatcttttcggcttctttagcatcgtaatcttgctgagccttctcaattagggtcaacatatcacccatacctaggatacgtgaagccattcgatcaggatggaaagtagaaagatccgttaatttttcaccttgaccggtaaagataattggaagaccagtgacagcacgaatagaaagtgcggcaccaccacgagtatccccatcaagcttagtcaaaacaattccagtcagatctaagtcattattaaatccttctgctacttgtgtagctgcttgacctgtcattgcatcaacaactaataaagtattatcaggatgagcaacttcagttacacgtttcaactcatccatcaattgctcatcaatttcaagacgcccagccgtatcaatcaagacatagtcatttttatttttatcagcttcttcaagaccatgctttacaatttctgctacatcttggttatcttcactataaaccggtacgtctaattgttgaccaatttgctttaactgctcaatagcagctggacggtaaatatcacctgcaattaacaatggacgagctttttcgttcttcattaagtaatttgcaagtttaccaacagtagtagttttaccagtaccctgtaaaccgaccatcataatgattgttggaatatgcggagatttattaagagaaacagcctcttctcccatcattttagttaactcgtcatcaacaattttgatgatttgttgtcctggatttaagctatcttggacttctttacctaaagcttccttttttatttttttaataaagtcttttacaaccttaaagttaacgtccgcttctaataaagccaatcgaatctcacgactagcgtcattaatatccgcttctgagatcttacctttaccagttaaattttttaatgctttttgaagtctttcacttaaattttcaaaagccatactattctactcccatttgtcttaataatttcaaaagttcaatctgagctcgattaattttgccatgttcaagggcatatactgcctcagtaattttttcttctatttgagtataatcacgtttcatatgaagtttatcttcatatttttctaaagcacggctgcttcgtttcaaattatcataaacagcttgtcgagagacatggtgattatccgcaatttctcctaaagaaagatcattgtaataataatcctcaaaatactcttgttgtccttttgttaataatggaccgtagtaggcaaataagtcgcctaatctttcatttttttcaagttcatccatttgtctcaccttgaaacagtatagcaaaaaaaatgtatttctaaaataatagctatgtagttttaagacacttttagtttaattaattttcaaaaaagaaggttaggcaactttcctaaccttcttgtatacgaatcttttaattaaagatttggatccattttaaatgttaacttagacatcttaattgcatcagtaaacatttgacccattaattcttcactatctttcttagtatgagcaacagtcttttggttttcacgagtcaagtagtcggttaattcctcaccgtttaaatctttagcattttcaataatttcttcaactctaccgcggtagtatctattcaactcttcaagatatttagtatcaagttgaacaaattgaggataatggctttcaactaaagcagccaaagatttgtagtaccaccatgcatcatctttattataggtcattgacgtattgttaaatgatggatcagtttcgttcatattagcaaagaatgggatatatggggtaaatgttggtccaccaatacataaccacataataccagccatttcttcaggaacatcacttctaatttgcaaaatatgtgagttctgagttctatttaaaccaattggacgataacgatgcttctcttcctcagttccatgaccaaacggatcaaatggagtatcttgataatgagaaccaagtgcaaattcaatatcttccttagccaatttcttagaagcttttctaatgaaaggaatatctggatcttcaggatcttgttcaatttctgggttgaaaagtttttggatataccattgacggctagtgttgtagtgacgatcttgttcagtataagttccaaaaatgtgacggaaattccaaccttcatgatcaggatttaagtgatgttcttcaacgaattcttgaattccttcactccacataaagttatctggatcatcaaagttaacttgttgaatagcaacacggttaccagttgctgcataacaatcatcgggaatacgttgagcaacccagtggtgtcccgtgacaatttccatataccatacttcatctttgtcaccaaacaaaactgagtttccagcaggtgaaccatactttttaattaaggaaccaagacgttttacaccatctcttgcggaatcaatatatggcaaaactacagtctgcatacaatcttcatctaaaccatctttaactaatggatcaaatgctaacgttctttcgttaccataagttgattcagtacatgacatagcaacattcttttggttgataccgctttcgtcataataacctaactttttatagtcaacatttggaactgctggaactctttgagcatcttcaggaagctccatttcaaacttattaagccaagatttaattttacgtcccttttcaccatgaacagctggctcaataataaacttttgtggcgtaattgcacctgcagtatcgtcattacgtgaaatcattactgatccatcaattgatgctttttttccaactaaaatagtcgtacatgcacttaaatgcttcattatttactccttatatattacttgtaactttgcctattattagattaatccttggaagagcccgattgcaaatttttctgcatcaaagtttgctaaatcatcaactttttctcccagcccaactaatttaactggcaaatccatttcatttctaattgctaatactactccacctttagatgagccatcaagcttagttaaaactaaacctgtaagtttagtagttttatcaaagtcttttgcttgtagtaatgcattttgacctgttgagccatcaaggactaaaagaacctcatttggttgatctggcaagattttctttattgttcgcttaattttatcaagctcgctcattaaattgaccttattttgaagacgacctgctgtatcaactaataagaaatcgattcctctctctttagcttttttaacaccattataaactacagaagccggatcagctttttcaggaccagtgattacttcaacgccatcacgtcgaccccattctaccaattgctctacagcaccggctctaaaagtatcggcagctaccatcatgacagacttgcccgagtctttaattcgcttagctaatttaccaattgttgttgtttttccagctccattaacaccaacaaaaagataaacattaggctttgcagaaggatcatcggctaatttagaatcttcaccttccccgcctttatcataaatatcgactaatttttcaactattacttgctttaaggcatcgtggctttttgcattttggagtttggcttcatcccttaaagaatcagttaattcttcagcagtttcaaaaccgacgtcagattcaattaataaatcttcaagatcatcaaaaaagttttcatcaactgttctaaatttagcaaaaaatgcatttaggcgtgccccaaaagaatgattggttttttctaaccctttgtcatatctttcctgttcatcttctgtagttacttcttcagcgctctcttcagaagattcagtttcttcgggcttttcttcttctttttctaaattagatgattcttgatcttcttgaagatcttcagcttcttgaacttcatcctgtttttcttcaaaagcagttccggcatcactccagcctggagtctccttaacttcttcagtttcttcttcagtttcttcttcagtttcatcttcagaagattctgacttaggttctacaacctcttcatttttttgaatatcttcagcttcattggtttgttcaggctcttgaagttcttcatttggattttcagttagttcttttttactttcttcttgttcttcatctttatgaccaaagagcgatttcttgattttatcaaataatcccactactaattcacttctttcttaatttcatttaacgatacagataacacttttgaaatacctgattcttgcattacgattccatacaaattatctgctttctgcatagttccacgacggtgtgtaataacaataaattgagttttcatatcataatgattcaaaaactgagcaaaacgatcaacgtttgtttcatctaaagctgcttctacctcgtctagaatacagaatggtactgggttaacttgaagcattgcaaacaataaagtaattgcagttaatgccctttccccaccagaaagaagcgttaacttctgggacttcttaccaggtggctgcgcaataatttcaattccagtttcaagtaagttctttggatcagttaactctaatctagcatgaccaccatcaaacataattggaaaaatctttgcaaagcttctttctatctggtggaaggttgcactaaacctactctttacctcatcatctagtttagacattgattcttcaatatcttttctagcctttagcaagtcattctgttgtccatttaagaaatcataacgcgttttaacatcttcatactcttcaatagagttcaagttaacctcaccaatatctgctaaagacattttatgtagatgaacttcacgttccaatttcttacgcaaatctgttgtattttgtccctcagataattgcaaagctgcttcaaaagttaaggaatattcttcacttaaaataccaagtttttgattaatttgggacttaagttctcctagccttgcagaatactcttcttgctccgcagcagtatttttacgcaaattataatttcttgtagcaacttgatcaagattatttatttgagcatcaaatttacctaaatctttatttatttcagctaaagcctcttgcatttgttttttctgcttacttagcttagcaacttgctcttcaatttctgactcactttgtccattttgagacaatgacaaagctttaattttttcctcaatatccttaagtctggaattggtattttcaagctgttcttccaattcagatttcttagtagtaatattttccaatttattctttactacggccaagtcggaatttaagttacttaattctgcctgtaatttttgataagcttcatcaaaatcggtcaagtcagtctttaattgatccatttttgctcgttgtgtttgagcaacttcttcaagttctttctttttagcctgctctttttcaagacgactagtaagttctgcttcttcttgcttcttctcaagttgggccttttgctgtaaatcatttaactgagtcagcctttgaacctctttttcttcattttcatacttaatagcttgctcactgattttttgatttagggcagttaaatcagtatttttagcttctagctcagtttgtaactcggttaattttttatctagttcgtttagggctgtttgtagtttagtaaattctaccttccccgtcttaatttgtaatgttaatttatcaatctcagcatttgttgccagaggagaattatttcttgtatttctagtcccaccagtcatacttcctccaggactaataatatctccatctagtgtcacaattcgataatatcttccaattctgcgttgaacacgtaaagccgtatcaatattatctaccactaaaacattccctaaaaggtaagaaatagcattagaaatatcagtcgcagtttttgaggttactaagtctgccgctacacctttaaatccttcaatactttgtaaggagtttaaagtggaggcagcaatctcattatgacgtaatccatctagaggtaaaaaggtagccctacctgtacgagtttgcttcaacaaattaatggcatccctagcactactttggtcaatagtaactaagtcttgaacgccaccacctaaagctgttgacaaagcggcttctaattcagctggaaaagaaattaactccccaataacccctacaattccatgaaaatcactttgatggtttaaaacatatttaaccccataatagtatccttcatgtctatttctaattttctttaggccttttacttgtgcagaaagttgttgtaaatcatttttaacctttaagtaagcttgttcactttgatccttaagcttactctcctcagcaatttttctatcaagagtcgcaatagtttcatttagttgttttctctttaaaacaaggtcttgcccttgtttttttaactgagtaagaactttttgagcttcatctaattgttcttcaacttcttgctggcgattatcatttgattttttactgcgagttaattcatttttcaaataaacaatctcgttattattactcgtttgatcctgcaaagtttgaatataatcagatcgaacttgttctaattgattattcaattgttcaggaccttgcttaagttcctgtttcaaattcttttgcttttctacgaaatcagcaaggacttgattttgactgtttagatctttttcattagctgcaagctgatctaacaaacgttttcttcgctcttttagctcttcagattgtgcattatattccttttgagtagcgacatcatattctcgagattgttgatgcatttgaagatcagtagtcagagcggcaattttttgtgttaaagataataattcttgctgcttttcatctttttcagcatggcgctcatttgattgcttacgtttctcttctaaatcagcttgggattgcttaacttcgtcatcaagcttatttaaaatcccttgatttgctgccgccttcttagcgaccgccttcttctcttcatttaaactttcaatctccaagcccaaaagttgttttaatttatggtcaagctgttctttctgaaatttatattcttttgctaaagaactctgttcatgtaaaggctcgattctaccttccaattctttaaccaaatcattaattctaattagattggcattagttttgtctaactgcttaagtgcaatttctttttgctgcttaaaatgaaggacgccggcagcctcttcaaaaattcctcgacgctgttgtggcttagaattaagaatttcatcgaccttcccctgagaaattattcccaagctatcagatgacatccctgattcaataaacagtgtcctaacatctttcaatcttactggatgatgatttaaaagataatcactttcgccgttacgcaaaatttttctagttacaaccacttcatcattatcagaagcaagttggtgatcacgattatcaaaaaccaactcaacctcagcatgattcattggagctctcatttgactaccagcgaaaataacatctttcatattttcaccacgtaaagacttggcagatccttcacccattacccaccgaattgcttcagtaatgttactttttccactaccatttggaccaacgatgccggtaataccattattaaatctaattgtcgtcttatcagcgaaagacttaaaaccatttaaaactaattgttgtagtggcacagactcaccttttcttatttatttttatctaatgcagcttgagctgcttgctgctcagcggcttttttattacgtccttgtccctctgaaactttttcaccatttacaagtagctgaactttaaaagatggctttgattcatcttcagatattacttgatattcaatcttaactggtccatttacctgcaaacgttcctgaagttcagttttataatcacgtgaggcattaaaatctccttcagcaattaatggatacactgttaaatgtaaaaagtgctgtacagctggcattccttgatctaagaaaagtgcaccattaaaagcttcaaacacatcttcaagaagtgtcttacgttttctagcgccagctttttcttctcctttacccaaattaatttcttctgggaatccacattcaattgcaaattcagaaaatccttctgttctaacaatgttagatcgcattcttgttaattccccttcatttaatctaggaaaatgacgatacagataatcagataccgccaattcaagaacagcatcgccaagaaactctaatttctcatagtcctttctcccgggatgctcattagcataagaagaatgtgtgaaggcatcttcaagcaatttttcgttattaaattttattccgtattttttctttaaattttgtttaaaagctactgaaaccatagttgcttcctttctttaaccctttaattatacctattttaacctattaaaaaaagataaagaaaaagtgtgacctaatataagtcgcacttttaaataatttttatttattttgcatagccaacgtagtaccagttagggaatccaccacccatactcttagatggttctaatgagtatccagttaacttattgttaattgcgtaaatgctgtagctattagcaactggcacaacataagcttccttatccatgtatgcttgccattgatggaatttcttaactctgtagctattattaaaggctttttgagaatcaatatcgttcaacaagtcagtgttttctttagtgacaaatctactgtagttaaatggtgcctttgcgccgtataagtcttgaggtgatggctcagaagagagtgaccatgcaccaatgaacatatctacatctttagaatcattttgaaccttgtcgtagaatgaattcatttccattaaacggccaccagttaacttaacgttcaagcccattttcttccattgttgaatgtaattttgaatgattggttcttgaactttactaccactcatggcagctaaacgaattgttaaaggcttaccatttggttgaacacggtaagtccccttcttcttgtaaccagctttatctaatagttcattaccctttttaatgttataagtgtaaccctttacattcttatcgaagtaatcaccgaattgctttggaattaaagttggaattctaaatgaaagacctgatgagtatctcttataaacttggtcaacattcataccgtaggcaatagcttgacgaagagaacgattattcatctttgcgtccttattcatcacattttcgcctttggctgcatcccatttaccaaccttaaagcctaagtaactatatgcaagtggaatattagcgatgaagtttactcctttagcacccttaatatttggccattgagaattacttacttgcgttacatcaaatttattactcttaattgattgagcaactgaagctggagtaattacggaagcagttatcttctttaagtgtggtttacccttatagtaatgttcatttggaacccatgaaactgattgtccacgaaccactttacttactttatatggaccatagaataatggattcttacggatcttattgcttgaaataagtttatcaaatggaacatcttttaagtaatgatatggagctgctgcttcccaaatatatccattaccactttgtgtcatacccggcttcatttctttaaagtggagtactactgtacgaccattttcgccgtctggcatttcaatacctgaaatagtattggactttccatcatggtattcttctaatcctacaagattagctaaacttgaagtataacgctgagaatgtgttgccttatttgcaataatttcataggcgtattcataatcttttgcaactaaaggttggccatcagaccacttaactttaggattaatagtaatggttgcagttttggcatctttattaattttaatgtctgctgctccacccttaacgtatttataggtattatttgtagcaaataatgattcatcaccatattgcattacttctgagtctgtattgttagtagacaattcatcattaaaaataccagtaaacggtgtatcagtaactacagcaacgctgacatttccaccatccttaattgtcttcttaggagttgactccttgaaattaggatgactagtattattgctattactattaccacaggctgctaaagttaaagctacacctgaaagcaaagttaatgtaccaattaatttgcctttcttcattaatttttcctccaataacattggacaagttgatatatttaattttagcactgaaaacgattaaaacaacttaaataaaaaaaaggccgtcacttaagacgatctttatgaagaaatttatctaatattattttgcaattcctacattgtaccataagctgtttgctgctgatggtttagatgagtaacctgtaatcttgctgttaactgcatcaatactataactgttagatactggaacaacgtaggcttcatcatccatatatttttgccattcatggaatttcttaacacggtaattagtattaaatgccttttgtgaatccatttcttgaagtaacttagtgttcttagcagttacaaaacgactaaagttgtatggtgcttttgcattgtataagtcatttggtgatggttctgaagataatgaccatgcaaccatgaacatatctacgtctttagaatcattttggaccttgtcatagaaggagttcatttccatcaaacgaccaccagttaacttaacattcaaacctaatttcttccattgttggatatagttttgaataattggttcttgagtagagtcaccactcatagctgcaaaatggatagtcaaaggcttaccgttgggttgaacacggtacttacccttcttcttatatccagctttatctaatagttcattaccctttttgatattgtaatcgtagcccttaacatttttatcaaagtacttaccaaattgtgctggaattaaagttggaatatggaaagtcaaaccgttggtataacgtttgtttacagcggagatattcataccataagcaatagcttgacgtaatgctttattattcatttttgcattcttatccattacgttttcgcctttagctgcatcccactttcctaccttaaaacctaggtaacgataagataaaggaatcttagcgatccagttaacattattagtattggcaacgttcttccattgaacattgattacaccggcaatatcatacttatgactcttaatggcttgagaagctgagttagggttcaaaacttgaattgttactttatctaattttggtgtacctctccagtagtacttgttaggaacaaatgttactgcttgaccacgtacaaccttactcatcttatacggaccaaagaatagtggcttctttcttacttgatcagatgattgtagcttatcaaatgggatatccttcaaatagtgatatggagctgcagcttcccagaagtagccattaccactgaacttcatacctggcttcatttctttgaagtgaataacaacggttcttccattttcaccatccggcatttcaataccagaaatagtgttagatttgccatcgtggtattcactcataccaacaatattttgaagtgagtcagtataacgtgatgacttagttgccttgttagcaataatttcgtaagaatattcaacatccttagcagttacttgcttaccatctgaccacttaacaccattcttaattttaatagtagcagttttgttatcattatctaattttaatgtagctggtcctttgtcattaatttgataagtatcatcagtatcaaataacccttcattagcaggtgccatagcatcagagtcattctgagtatcagaaagttcatttaaaaagataccagtaaatggtgtatcagattcaagtgcaacacttactgtaccaccctttttaacagctttctttggagtagctgacttaaagttcttagttgggttatctacttttgaatttgaattgttaccacatgctgctaatgttaaagcaacaccagaaagtaaagttaaacttccaaatagcttggctttcttcatagttatattcctccatctatttgggacaagttgatgatttaatattatcatcatcaaactcataatacaatgttttcactcaattatttttaatattttttaattttaattcgactaaattgctataaagcgctgatatattaacgtttgttcactattatgtttaccataaaaaacttattttatgcccatttacaatatcaatatttcctacattctttagtttttatacaaagacatgcaaaaaagcaactcaattatgagttgctttttaatatttaaataatcaaatttaattttcacgttgacgagcatccccagctctttgaagagcacgaccaacatagttaatactcaaggaaatgatcaacaacataatagttgctggcatccataaccatggacgtgtagtaacgttaacagggtcattagcaaatccaattaaagtaccaagggatggtgtagtggttggtaatccatatcccaagaaggataaagtagtttcaataccaatgtttccggcaatcatcaatacgacatcaattaccaaagctgaagtaatgttaggcaaaacttcacggaacataattgttaagttagaagaaccggaagtcttggaagccaaaacatattctcgttctctctgggacaaaacaaatgcccggaaatatcttgcagttgaagtccacccaaacatagaaatcaataataccaaagtccaagcattgtagttaggaataacagtagttaaaacaatgatgattgggaacataggtaaaatctggatgaagtcaactatacgcatgataattgcgtcagttaccccaccaaagtaacctgagaacaaaccaactaaaagtcctataccttcacaaagtacagtaacagatagaccaattaaaattgagtttcgtccacccatcatcaataacttcagaatatcacgaccaccgtcatcagtaccaaagacgtgaccagattcaccccaagcataatatgcttctgcaatattaatctctgttacttgactcttatttaagaataaagaaccaacaaaagtgaataataagatagctacaataatacagaatgaaacaaaggctaccttatcacgccaaacctcacgagcaataatcttaaatccagatggtggtagagaggttttagcattttgatcttttttcgatgtatttttatctttagccataatttactactcctccctacttgatccgaattcttgggtcaataatactcatgataatatcagataacaagttaccaactaaagttaagataccaaataataaaattaaggcagttaaagttgagtagtcacgttgaccgatagaatcaaggaataacttacccataccaggataactgaagactgattcgataaccattgaaccagaaagtaatccagtaatagtattaccaaagaaagcagcaattggtaaaagtgagtttcttaaaatatgtttattgaaaacaacattttcaggtacacccttactacgtgcagttcttacataatcttcaactttgttatcaacaataccagttcttaagtattgaacaatggttgtagtagaaatcaaagcacaaagaattgacggtaaaatcaagtgatagaatctactccagaagtaagcgaaggttcctgggttaacatctgcacttacagaaccagaaattgggaaccaacctagagtaaatccaaatagccagatacctaagatgtagaaaacaaatggaggaactgcaaatgtaatgtagttaaaaatttgcactccgtgatcttgccattcatcttggtgacgaccggctgtaacacccaatggaactgcaattaagtaagttaaaacaacagtcattaaagacaaccagaaagtgttaactgcacgatcccaaatcaaagaagtaactggaaccttttgaatatatgattgtcctaaatcaccgtggaacatatttccaagccagcgagtatattgcacccaaactggatcgtttaatccatattcttgtcttaatcttgcaatttccttagggtctgaattcggattaatcattccagtaaatgggtcaccaggcatcattttagctaaaataaagactagtaaactcaagataagtaactgggggatcataatcaggattcgacgtaaaaccgttttccacatatctattctccctccttcaattcttgctcaatcatatctttaggtaaagcaacgaaatgacgctcgccaactttttgtagtggtaatacacgaccatctttttcataccatttatcttgatcttgcaaaaattcttgttctacacgttgacgctcttccttatgtttttccctattttcaacatcaacaacaggaattgcagaaagtagacgctttgtataaatgtgcattggattcttgtaaatttgatcacgtttaccaatttctacaaaacgtccacggtgcataatagcaatatcttctgacatgtgctttacaacacccaagtcgtgtgaaatgaagaggtaggcaatattatattcttgttgaatatgtttcataaagttcaaaacctgtgcttgaacagataagtccaaagctgaagttggctcatctgccacaattaatttaggatgagtggctacagcacgtgctaccccaattctttgacgttgaccaccagagaattcatgtggatatttgtagatagcatcactaggcataccaacaatatctagtagttcttgaactcgttttctttcttcatcggttgttaagttttcaaagtttctaatgggttcagcaataatatcttcaattcgttttctaggatttaaactcgacattgaatcctggaaaatcatttgaacatctttattgtagttaagttttttacgatttgatgctttagtaacatcaacacctttatacaaaatttgtccgctagttactttttctacaccaacaattgctttaccagtagttgatttaccggaacctgattctccaattagaccgtaggtttctccttctttaattgaaagattaattccatcaacggctttgacatatccagtaactctattccaaaatccagaacgaattggatagtgaacttttaaattttttatttcgattatttcatcggccataatttcctatcctttcttctcttcatcttggaaatggaagctttgccagcaagtacatcttacaaaatgtcctggttcaacttcatgaatcttagggttctcttcatgagcactagctggaatccaaggaattctagctgcaaatctatccccagttcttggcatgttaatcaatgaaggaactgttccatgaatcacatgtaggtcttcactttcatcatctgtttgtggcatagagtgtaaaagtgaacgtgtatatggatgaagaggattttcaaaaattgttttaacatcagctttttcaacaatttgtcctgcatacataactgctacttgatcagcagtttcagcaacaacacctaagtcgtgtgtaattaacacaatccctgactgagattctttttgaatttctttgagtaaatctaagatttgtgcctgaatagtaacatccaaagcggtagttggttcatcagcaataataatttctggcttacatgcaattgcaatcgcaattactacacgttgacgtaaaccaccagataattcatgtgggtacatctcatacatttcttctggacgaggcatcccaacttgattaaagagttcaattacgcgtgcatgacgagccttttcatccatatcagtatgatagtaaagtgtctcagcaacttgatctccaaccttcatcaatggattaagagatgctaatggatcctggaaaatcatcccaatattattaccacgaattttattaaacaatgattcatttaagttaactaagtttagttcattgtataaaatatcgccagttactttcgtatttttgtggtcgtacaaaccaataatgcttgaagcaattgtacttttaccacaaccagattctccaacaactgccaaaatctcatttcgtttcaaggttaagttaatgtcatcagcggcatcataaaacttaccgtgtaaacgatatgcggtatgcaagtgttcgatatctaataaaagatcactttgcttttccaaaggccattctcctctcaaaccttacgacattattaaaagtcaattagattttcaatttaatgtcattattataaacaaaagatactgctatttcaacaacttttataaaagtaaatgaaaaatgacagtatcttctgaaatttcaatgattaaaattttaattttggtgactcttaatatattctactgcttcaccaacagtttgtaatttttccgcatcatcatctggaatctctgctccaaatgtatcttctagatccattactaactcaacgaaatcaattgaatctgcatctaaatcattctgaaaatttaaatctttagtgatcttatcacgatcaatactaaagcgttctgaaatcatatcagcaattttattaaaaatttcctcttcggtcattttttaacctccaaaaaagtttagtttaattctaaggcatttttatattaaagtctagcgagattcactaaagtattttttatattctccaactagatcttgactcaacatcttatcaatttgtaataaagtgtagtaaataggacggatattcgatctaccgtgtgtctttacaacaggtgcatttaccccaagtaaaactgctcccccatatcttgccgtatcaaatcttttctttaatgcagtaagtcctggctttgctaataaggctcccaccttaggacgtaaaccattatttagcaaagaatccttaagcagacgtaaaattacgcttgcagttccttctattgccttcagagtagcatttccagtaaaaccatctgttacaatcacatcagccttaccttccattaaatcatttccttcagcattaccaataaaattaagatcagttgctttaagaagcttataggcctcttggtggagggcatctcctttatcatcttctgcaccattatttaataaagccacggttggatttttaatatttctaattttttgtgcataaaaattagccatttgtgcccattgtactaaatattcaggcttactttgtgcattcgcgccaacatcaataatattaaagccatcctcgcttttagcactaggaagagttggcattaaagctggacgctctacacctttaattcggccaataataaaaatcccgcaagctaatagcgcacccgtatttccgagggaaaataaggcgtctgcttttcctgactttacatagttagcagcaacaaccattgaagaatttttcttacgtctaattgcttttactggctcgtcactatcaataataacttcactcgttgcaatgacgtcaattctatctttttgctcggcgggaattagttcattaatcttttcttcatccccaaataaaacaaattttgtatcttttaattttggctttgcttttaatacagcatcaacaatagccttaggagcattttctcctcccatggcatcaattgcaattgttttcatattcactccggttatttctaattattattcaaatccttcttatattttagcacttcttgtaaaaatttattttctgaattaaccaaagctgggtcagacttaattaggttacgagcttctttttgagcagtcactaaggcattatagtcatttactacatccccaacttgaaactgaggtaaaccagattgagcctttccaaaaacatctccttcgccacgtagttttaaatcttcttctgctaatttaaaaccattactggtagaagtaataatgttcattcgtttcttaccaatttctgtttttggatcactcacaaacacacaaaaactttgtgtctgcccccggccaattcttcctcgcaactgatgcaattgacttaagccaaagcgatccgcattaaagatcaccatcatatttgcattcggaacatcgacaccaacttcaattacacttgtagtaactaaaatattaatcttgcctgcagcaaagctatccataatttcatttttctgatcgcctttcatctggccatgaagcaaaacaacattttcgtctttaaagtaatgagcaatttttgcttgtaaatcctcagcgttttttaagtcacttttttctgattcactaattaaaggagttacaacataaatttgaaaacctttatctaactgtgaacgcatcaaatcaagcacctctcttaatttgctggaagttgcccacgaggaaactactggctttctcccttttggcaagtgtctaatttcagaaacagccatatctccgtatacggttaaggctaatgtacgaggaattggggtggctgtcattgctaggatatcaggtgcgtcaccttttttaatcaacgtatttctttggtttactccaaatctgtgttgctcatcaatgataactagaccgagatttttaaaatgaacctctttttggattagcgcatgggttccaatcacaacattgattgttccatcagctaattcacgataaatttctttcttttctaaatccttagtgtctcccgtcaataaggcaactcgaacacccaatggcttcagtaattcatctatcttagcaaaatgctgctgcgctagaatttctgttggaaccattaaagcagcctgatagcctgcagtaacagctgcataaattgcaaaaaccgctactacggttttaccactacccacatctccctgcagcagtcttcgcatttgtcttttagaatgaagatcagcaaagatttcattcaccacttttttttgatcatcagataactcaaatggaatttcttcaattaattctttgacagcagctaaatcatatttcttttctactccaggtgcgtcttcatttctttgggaaagaagttgagccagttgcatttgaaaaagaaaaaattctctaaaaatagcacttcggcgtgctatcttcgcctcattgccattttttggatgatgcattttttctaccaaaacgcgatcagaaagcaagcgatatttttctcttatagaagctggaattgtttctccaacttcatttatagcttcctgtaaagcaagatcaattaacttttgcagcttattttgcttcaaatgacgattgacagaataaataggagcaaaacctgaatctttcttttcagctactaatttaaagccactgaatgactgccgcgccacttgatacttgccatatactgcaacttccttacctgattccactttatcctttaaccagggctgattaaaaaaattgaccatgataatgtcatgatcaatttttattttaaagctgagccttgtttttcgataaccaaatcggctaacaaatggatctgttaccaccattccctttaataagactttctgcccatcttcaatttgatcaagaggaattgtctctaaatcatcatatctaaaaggaaaataaaatagtaaatcataaattgtgttaatgccaagactggccaaagctgtagctgtctttgctcctacaccttttaactcagttactggttcaaataacttactctgcttattattcatattttattccacggatactaagaagtagtaaactggctgaccaccatcatggacttcaaactctaaatcatcatgagtagctttaagttttttaactacttcgtcagcttctgctctggtagcatcactaccatacataatagtgataatttcactatcttcatctaacatcttttcaatcattgaaactgttgtatcaatcaagtctggattatcaaccttaatggttccatcaacaattccaaggtagtcatcttttttaacttcaatatcatcaatcttagtgtcacggattgctttagtgacctcaccagatttaaccgtatctaggtcttcagacattgcttcaacattttcctctactgaagcatctggatcaaaggaaagcattgcagttaatccttgagaaattgtctttgttggcacgattccaaccggaatttcactaacttcagcagcttgcttagcagccatgataatattaccgttatttggtaaaataatggcctttttagcaccggagttagtaatagcatccataatatccttagtcgatggattcatagtttgtccaccagaaataattctatttacgccctcactcttaaataattcacggattccatgacctgaggcaactgcaataactgcaaaatcaacattttcttcttgttcttcgctattttctaagatagtttcatgttgaatccgcatattatcgatcttaattttacctagttgtccaaatttttggccgtatgtaaaaacatctcctgggtgttctgtatgaacgtgaactttagccacttcaccatctgaaacagctaaaagtgaatcacctaagttagatagatgttctctaaattgttcaagattgaattcttctttatttggaacatcagcagttaggtcaaccataatttcagtacagtaaccattcttaatatcactagttgataattgaacttgagcagattcagcttggtggtgagctgcattaattaactcatccatttcaccttcatctagttggtagtcatcattatccttttcgccaagaaccccctctaaaaagccttggtagataaatactagtccttgaccacccgaatctactactccaacttgctttaaaactggtaataaatcaggcgtagtcttcaaagcctttttagctccatcaactaccgctctcattacttcgctgacatcatcagtttcgtttgccttatttttaccttcctcagctgcaacacgagcaacggttaaaatagttccttcaacaggcttcataactgctttatatgcagttgtgacaccatttgcaaaagcattagctaaatcttgagcagttagggtatcttttccttcagtagctttataaaaacctctaaatagttgagaagttataactccactgttaccgcgagctcccatcaacattccttttgagagactttcagttaggtcaccaacggattcactaagattttcattaacagcttttgcgccgctctcaatggttaaattcatattagttccagtatcaccatcaggtactgggaaaacatttaatttatttacaaattcagcgttcttgcccatgcgatgagtcgctgcacgaaccatatctctgaattgatcactattaatttcagttaaaaccacaattaactcctccagaatgcattaatcgtctaaaatctttacgccttgaacaataacgttaaccgacttagtcttaatgcctaaaagattttcaagattgtattttacactatcttggacattgtgacttacttccgaaatttttagaccataacccacaataatatatacatcaacgacgatttgattatcattagttttaattacaacaccgcgacgataattttcacggtttaaaatagtataagctccatcccgtaaagcgttctttgaagccattccaactacaccatagttagaagtagctgctccacctacgacagtagcaattacactatttgaaatatcaattaagccatattttgttttaattttaacagccatcgtattcctccattaacgaagaacaattttttctcaatttattttaacacagcaggcttttatatcaacaatgttagtttcaagaaaatagaaagacaatattgcacaattctaaaagctgtgataaattaaataagtactacaacaacataaaggagggtttagcacaaatggcaaaagacattattactggccgcaagacggtctttggtaacaagcgttcaaaggctttgaactccgtgcggcgttcatggaagccaaaccttcaaaaagttcgcatccttgttgacggtaagccaaagcgtgtttgggtatccgctcgcgctttgaaatccggtaaggttaaacgtgtctaattaagaagtaaaaataaaagggatcaagaaatatttcttgatcccttttattttttatctcgactattgattacgattaatgtcccagactcacacgaaatctctattgcttgcctattcaaatattcatttgatgaataaactgtcggtacggacaaatcaatgggttttaaatcatatctcgcatttttaatactaaaatttttagctcctgttaaagttccaattcctaaatatttataatcagcttcataagaaagtatgtgcttcccttttccaaaaaagcggataatattttgcttatcaataaatttaattttttctttaaatctatcaaacggagctttcagcatagcatacatattaacaaaaaaatgatccattcttcctcctgttgctccatataccgttaaactgtcaactcgataatcgataaatgcggcataaaacaacatttcagaatccgtaaaatctttgattggattcgaataacgcatatccttaactttactttcaacgatttctctttcatcaaaagtcaatgaatcataatctcctaaggcaacgtcaggtactatccctaactctaataaaaaaaggctgccccgatcactagccataattagggcgccttttttacttgcttctttaatttcagtggctaaattatgtggccattcttcttttggaccacctaataatgcaattgctctcatttgtcttcttttttcaatttcataacttgatcttcaatacttccatttttaaaaatgtaagaaccagctacaaaaattgtggctcctgcgtctctagtaagctttaaagtcttaggctcaattccaccatcaacttcaattggaacacttaaattctcagcttcaatcatattcttaagttcaactagacgctcaactgactcttcttcaaacttttgaccaccaaaaccaggtttcactgtcatcaaaagcacttgatctaattcttttaaaaatggctgcaatttttgtactggtgtagacggattgattgccattccgcatctaacattatgatcttttaaatatttcagccaatattcaggattatcagttgcttcataatgaaattctaaaagatcacatccagcttctacaaagagaggcaatgttgtttctaagtcattactcattaaatgaatttcagcatctgttaacggaaaagatcgtttaaagtcttttaccaattctggtccatatgacaaattaggtacaaagtgcccatccataatatcaatatggaatctatctatgccactttcaatagctgctttaatatcacgacttaaatgcatattatctgcattcaaaattgatggtgctatcatagtttcacctatttctttaaatactctggcattctattgtcagaaatttcttgtctaatttttaaataagattcataacgactgcgcgctattttaccctcttctacaagttttttaacctcacaaccaggctctttaatatgttgacaacctctaaatttgcagtttgcacttgcttcttttaaatcataaaagtaatttcttagatcatcaactttgatcttaaagagatcaatagctgaaaaaccgggagtatcagcaataaaaccagagccgtatttaaatagtgttacttgtcttgtggtatgttttccacgatttaatgcagttgaaattgcccctgttacctgctttgcttcactctctagctggtttaataatgttgacttaccggcacctgattgcccagctaaggtccaaatctgatccttatcgatcatttttggaagttcattttccagtttttctgcatcttcaaaaacaggatacccaattctttggtagtattctaactcagtttgaatatcttttaatctttcagaagaagtaatatctgattttgacaaataaatgactacgccaacatttttccaagcaaaaaatgttaaatatctatctaataattcaagtgaaaagtcgggctcgacagcggaaattactaacaatactctagacacatttgccactgctggccgtcctatttcattaatgcgtggtaatatttcaattaaatagttcatcccctgatcatctagctgaactactactctatctcctaccagtggcttttgtttgcgatctctaaaaactcctcgggctctcgttctaactactttattatcaatttcgacatcatagtagcctgaaatagcactaataatcgttccttctgcttttttcattatttattaacgtcctcatctaaaatcgtttcaccatttcgcaatatctttatatgtccattttttttgcttaacttaaacggaatggtaaaagtttgttcagaagtaatattcatatctttgtaaatattattaattgaatgaccatcatcagaaacatatacctgaatatgatctggcgttttttctgatccgctttgatcagcacttcctggataattaatagtataagattttgtaacagtagttgtagtagttgaactgcttgaagtatcagtagaatcatttctcttagcttttgctactactactgttaacctatcccctggattcacatcagtacccgattctggggattgacgtaaaaccgtaccatcatttttaccatctgagtcttcttcttcaactttaagtgatagatgatgttcccgtgcgtaatctcgggcacctttcaatgaatatcccacgatatctcttaattttattgtatttcgtctagatcgagtactactcgccgaactaggccccttcgaaaccaacaaagtcactgttgatttattaggatttacttcctgacctggttcaatatcttgagcattaacctggtttttaggactaggagagtattcttcagttttagtaacagtaaagcccagtttaaccagctgtttccgtgcaagagaataagactctccaattacatttggcatttcaacaagatgactacctcgagataaaactaagttaactttttctccatcttttatctgagatccaatcggagggtctgttctaattacttctccttttggaacactatcagaatattcataagtaatttttccaatttttaaattagaagattgaagagatttcttagcctgcgtctgactcatacgattaatattaggaatatctaccatatcttttctaccaagagcaaagaatagaattaccataattacacaaaatgcaattatagctcctagccaccaccatgtatgacccttaagatttttaaacagactctttttttcttctttaggttcttcctttgcttgcacttcatgatctttattatgaacgcttccttcaagaggaggaacaacaatagtttcatcagtagacggatcatgctcgggcttaaaaatcggctcatccttacgttttggatcaagacacgtatccaagtccgctttcatttctaaagcggatttataccgatctcgtggatcttttgctgtagctttaaaaacaacattttctaaagcttggggaacgttaggatttttatctcttaaagatggtgttttttcttggaaatgctttagagcaactgcaacagcattttctccagtaaaaggaactgtaccagtcaataatttgtaaagaattattcctaaagaatagatatccgattgttttgttgccatactgcctcgggcttgttcaggtgacatataatgcactgatcccattgcagtattggtttgcgtcatcgtactttgatttaaagcaattgcaataccaaaatccacaattttaatattgccttttttatccattaaaatgttttgtggttttaagtcgcgatggatcacattgtgcttatgcgccaatgcaacggcacttaatatttgatccatgatatcaattactttaggcaaaggaattggattattatgttggatgtattcttccaaatcagatccatccacataatccattactaaataatgacaatttccgtctgttcctacatcaagaatcgaaacaatatgcggatgacttaattcactagtagaaagtgcctctctttggaaacgttgaatagtttgaggatccttttgcaaatctagtcgcaaaactttaactgcaacttttctttgcagaataatatcttcagctaaataaacattagccatcccgccttcgcctaaaacagagataatcttatagcgaccaccaagcaaatggcctttctccattgctatttgtcaccatccttttctacataggcaagcaaacaaacagtaatattatctccaccacctaaacgattagcttcattaataagtttattacaacgctcttttaaacttaaatttttagtggcaaggatttgttgaatttgaggatcagttaacgaatttgttaatccatccgtacaaagcaaaaaaatatcaccagcatgtacttcaagaatatcaaattctggatttacagtacttgagactcctaaagtttcagtaataatatttttttgaggatgatttcgagcttgttgctcggtaatttggcccattttaactaattcatggactaaagaatggtcttcagtaatttgcttaaattcattacctccatagagataacaacgtgagtcacctagatgggcaattaagatcttttccgtaaaggcaattgctaaaactattgtggtgcccattccatttagatcagaaaaacgatcggctgtattcaagatagtttcattttctaatcttaattgtacagttaaccatttttgagctaagtcaggatcagtaaaatctgttttttcaaaattatgacctaaatgactaactgccatcgttgaggcaacatctcctccttgatggccacccataccgtcacaaacgatccccataataatattattttgatttttaaatacctttacaaagtcctgattagtttctcggactctaccaatacttgaagcaaatgctgttttaatcaaaattatttaccctcgtttttttaattttgcaataaaaaatccgtcactgccgtcactacttggaaaaatacgtaccatttcttgcttaggaagctttcctacttgaactggtatcaactcaaaatcgggatgcaattttagaaattgcttaactactccttcatcttcttcatagctgatggtacaagttgaataaaccaattctcctccattagctaaaagcccactcacactttccaaaatagctaactgaatctttgctaaatttttaatatcatttagtgatttttcatatctaatctctggctttcgcctaatcaaccctaagcccgagcaaggcgcatctactaaaattttatcaaattgtccttgattaaaatattctttcgcctttcgtgcatctaaagccttcgtccttactttatcactaacatgaagacgttcggccgcatttcttacaagccttagtttattctcatgaatatctaaagcaattacactacctgttgtcaagttttcagcgatttgaaccgtcttaccaccaggggcactacatgcatctaatacctgttcactccccttaaagtaaaacgcatccacagcaagtgaagcagcagcatcctgaatagtaatttttccatttttaaacagagcggtttgcgctactccacctttattcaaatttaaattatgcggagttagactagactcttcaaaactaaaattatctttttttaattcttctttgatttcttcaaagtctgactcttttgtagtcattctaattgaattagcagcaggttgattacttcgtactaaaatttcttttgttttattttcaccaaaatgatctaataaatattctactaaccatttaggaaaactctctttaatacttaaatattcaactaaatcattagttggtggcaaaatttcaccttgacgctctaaagcacgcaaaattccgttaatcagcttataactgccactatttctcttactatattttttagcaagcttgtttgcctcatcaaaaatcgcgtttgctggtactttctctaagaaaaagtactggtaggcagacattaaaagaagcggctttaaaaaactatcgcgtagttttgttttaattaacggttttaattgatactctaaaaatattttatattgaattgtaccatatacaattctagtagctaaggccttatcagctggctttaaatcatgttttattagttcattgtttaaagcaatattagaatagcttttttgattaaaaactttgatcaaagtttctaaagcaaccgttcttgcattactcatcaattatcttatctccaattgtaaaatgactaccttgaccattgagataatctttaatattcattttcttcttaccagttggctgaacttcaagtaattctaattggctaccatcagccatactaattacgaatttctttttattagtaactaaggttccagctggaaaactagtcttttcagtcaatggctttgctttccaaactttgaatctctttccaccaagcataaagtaagcacctggatcaggattaagggcacgaattagattattagcttctttagcagtcattgataggttgatcttttcttggtctttagagatattaggtgaaaagacaaccttatcctcatcctgagcagtccgagtaactgtcccatcgataaacttaggtaaagtttctaagagaagatctcttcccaaaatacttaacttatcaaataaagtaccacttgtatcttcatctgtaattggcaaagctttttgggcaaaaatatctcctgcatccatctttttcaccatctccataatggtgacaccagtctctttatccccattcaaaacggaatattgaattggtgcaccaccacgatatttagggagaagagaaccatgaacattaactggagctactttagctgacttcaaaaacttcgttggcaaaaattgcccataagcagcggtaataataaaatctggttcaatcttcattaattctgcaagttcttctgatcctgacaatttagcaggttgataaactggaagattatgtttcaaagctgtttccttaacagcagattgatggactacttgtttacgcccaacgcgcttgtcaggctgagtaacaaccgctttaatttcatatccttgttcaattaatccttgcagaacgacactaccaaaatttggagttcctaaaaaaataactgatgacatagattcaacttctttctaaacttacattattctctctggttcattatcaatatatatatttaaaccacgtttttgtgctaattgtgcatcatcttgaatttgatgaagcaaatcatgcaacttaggctcatatttatattttaccaagatttggtaataatattgatttttaattttagctacactacttggcgtcggacctaaaataatagtcggagcatgtaactcccgcattaactttctttttattacgaatgcctctttagcagctgactgttcattttttgatgtaatagtaattaaggtagtataaaaaaatggcggatagtttccttgaaatctaacctgcatttcttttcggtaaaatccctcgtaatcttggctttgggctagttttattgcataattttccggattataagtttgaatcataactctaccagttttttcagctcttccggcccttccagctacctgggttagtaaatcaaatgttttttctgaagaattaaaatctggaagagataatgctgtgtcagcattaattactcccactaaagtaacatttggaaaatctagtcctttagcaatcatttgtgttcctaagagaatatcggcttgatgattaccaaaactatcaagaattttcttataacttcctttacgtctagtagtatcaacgtccattcttaagatcttagcgtcaggaagtaaagtttccagttcttcttgaactttttgcgtccccgtacctaaaaatcttattttttcactctgacaatttggacattttcttggaattggctccttatggccgcaataatgacattgcatctgtccagtatctttatgtaaagttaacgagatatcacaatttggacattttaaaacaaagccacaattgcgacaaagcataaaactagcaaaaccacgacgattaagaagtaaaataacttgttcttttttagctagtttttctttaattgcatctactaagggaattgatagatcaaactgtccaccagcaaattcaacagtttttaggtctattagatccactttaggtagcgacttttgattagcacgtttagtcagacgcaataatttatatcttcctttttgagcccgcgcccggcttgctaaagaaggcgttgcacttcctaaaacaactggacaattgtgaaatttacttctcaatagagctacatcccgtgcatggtagcgaggagtatcgttttgcttataggaagattcatgctcctcatcaattactattaaaccaatattttttaaaggagcaaagatcgcgcttctagctcctactacaacttgagcttctccacgcctaattcttcgccattcatcatatttttcaccttcagataaaccactgtgtaaaacagcaacattatctccaaaacgctctttcacttgtttaaccatttgaggagttagagaaatctccggaactaacattagagcattacgcttctgttcaagagctgtactgatagcgtgaaggtacacctcagttttgccgctcccagtaattccctcaagaagaaaagtcttagcctctttttctttaatactagtcccaattgaatttaaggcgtctaactgttctgaatttaatctaaccgaatgcttactagcattagattcaaaatcttttaatggatttcgataaatctcctgctctttttttaacagccatccctttttttcggctgctcgtaatgtagaacttgagattcctaattcagactcaatagttgaacccaattttggatattcgttatatttttcaacgatattattaagcaatgctcgctggttttttgctgttgttcttattcctcctaaaatatcctgatattctgttcttgttttagtcaaaagataggcagccacctgtttcttcttagctttattttcaactaagtattcaatcttagcttgattattttttatgagctttttaatttttacaattgtctcaagatcagaaacttcatttaaatcaagcggttcacctttaaaaagagtattttctttaatttcatctgtaaggggaactagaattttacgataattcgccttcattacgcgtggtaacattgattgaagaattgtaatccgatatgaaaaaattttatcagctaaagttttagaaagagcaattaattctggcgtaagtggtggcaattcatcaattacaacaagtaaatcttttaattttcctgtataagaagttgtttcactgattccgactacaaatccctgcacttttcgtcgaccaaaaggaacaaccactcttgatccaacagctacatcagttaattcctttggaatatgatattcaaacactcgatcagtttgtttggcagctacatctacaataacttgcgcaatcatttatcttatcacctactaaaaaaccttcattgattaacaatgaaggaaaagattctaaccaatatcttcacgatgctcaggatcaattgtaactttaccagcagcaatttcttcaagcgcttcgcccactgctttatcagacttatagtgttttaaagctaatggagcgcctgcttgaatctcatgagctcttttagcagctaacactgaaagagaataacgagaatttactcgagacagcaatttatcaatagatgggtatgtaattttcatctgttaatcctccttaaccatatttctataatcgttaattactcgcggtacacgcacgtgttcagcttcaacaatagacttaatatgatccaccgcattagcaaccgtatcgttaactacagcataatcataatcttccatcattaaaatctctttacgtgcctgtttcattctcatggcaattaccttgtcagaatcagtcccgcgattaacaattcgatgttttaattcatgcaaatctggtggtgtcaaaaagataaagacgccatctggcattaacttgcgaacctgttttgctccattgacatcaatttcaagtaaaacatctttaccttcattgagcatcttttgcactggtgcaagtggagtaccataatggttgcctacatattcattatattccaaaagctcgttacctttaattgcttcttggaaacggtcctctgaaacaaaataataatccttcccattaacttcgcctggacgaggcttacgagtagtcattgaaacagaatattcaaatgaaaaagctttttgcttcaccattgcacttttaacggtccccttaccaacgccagaaggaccagataaaactaataataaaccttgatgtgccattttcgctcctaaaaattatagtaacaagaatatattgcactaaaaaacgaggaatttcaagagtttcgcaaagagatataaattccacttgcaatcaaaaacatttgttcgtataatacatagtgcaaacacaagttcgggatgtatagaggaatgagatatgaatttattaaagtcgcttaataattatagtaaacaactttataattacttctttaattataatattaataagcttactacttttgcacaagacccaagtaaaattattagaattttagagcatgcactttttcataaagaatatatattactgacctatcaaaatggatgcactgagattggtcaactaatcaaaaggacatctgctgggcgcttcgtactagatagctatgatagcaacataattagaataattgatttaaacgagatctttaacgtcgaaacagcataaaaataaaggacttttcagtacaaatgtaattttcactttaaactgagaagtcctttattttattctttaaaactttccattaaatcagctgcatttctcttagcagcatccgttacatcagagcctgccatcatctgagcaattgcggtaatggcttcttcttgcgtaagaggtcctacttgagtataagtagctccatctttaacttgttttacaactgaataacgttgatctccagcagcagctacctgtggggagtgagtaattgtaataacttgtttttcttgaccgattgcatgcatctttttaccaattgctgctgaaactctgcctgaaactccagtatcaatttcatcaaaaatcatggttccaactggttctacacgactaaagattgcttttaatgccaaaattaaacgtgattgttcaccgccagatactattttgactaatggcatcaaagcttcaccaggattaggtgcaatcataaagataacttcatcagttccaagttttgtaaatgaattagtctcattaattctaatagaaaagcgtgctttttccatatacagatcagctaattctttttttattttttcttcaagatcgcgagcaatcttttctctctgttcatgtaaattttgggctttttgactaagttttttttcaatgattgcgagttctttttggatttttccctcgtctaaatctccagtttcaaacttatttagttcacttttaaccttttgtccgaatttaaaaacatcgtctaaagttgggccgtattttttcttcaaagtattcaatgtatctaatcgactagaaacatattgatatcgctcttcgtcaaagtccatttgatccattaaagtagatagttcactacgagcatcatttaaagaataaataccatcattaaggctggtagcaaaattttcaaattttttaccataattactcaaatcttcagcagcattttgggcatccccaagtaacgtagctagtccatgctcatcatcatcatataattgcataaaataattagctgtatctgcaattttttgataattattgagctcattaaattcttcttctagcttttcatcttcatttggatcattcaaatcagcactttctagttcattattttgaaattccaaaatatcctgtttttgagcaatttcttgagcatcttctcttaacttacggagttgagaagtaagatgacgccatttctcaaagtcagtttcatagctatgcaattctttcttaaattcaggctccgcataattatcaatcaaatctatttgtcgatcttgatccatcaaaatttgttgatcattttggccatgaatatcaactaaatttcgtccaatttcacgtaaaacattgattgtagtcagctgaccattaattctaactacatttcttcccttatgtgttaattctcggctaattattagctgatcatcttcaaaaggcagaccatatttttcacataaatcttcaataagatccttttgttcgcttaacacaaataaaccagtgatgaccgccttctcttcacccgagcgaatcatttcactttgcgcacgacttcctaagagtagagagacggcatcaataataattgatttaccagcaccagtttctccaatgagaacagtcattttttcttgaaagcgaacttttaaagttttaatgattgcaaaatttttaatatctaattcaactaacattttatctcacctaaaggccattaactgcacgttgaactacatcggaaggattacctttccataagtcttgacctggatttgctatgtcttttcctaaatgaataagaaattcaatatttcctttaccacctttaattggtgaatagtctactcccaaaatattaaaccctattttttgagcaactttcatggtatgtttaataacatttgcatgaacttcatgatcatgaacaatcccatgcttacctacattctcaggacctgcttcaaattgtggcttaattaaacacactgcatcgcatttatcttttaaaatttcatacattggcggcataattaaatctaatgagataaaggaaacatctgtcattgcaaaatcaggcaatccatcagtgaagtcgactggcttactgtagcgaaaattctgtttttccattactacaacttgaggattatctcgtaacttccaagccagttgattatatcctacatctaatgcatagactaacttagccccattttgtaaggcaacatcggtaaaaccaccagtggatgctccaatatcaaggcaaattttccctttcaaatcaatattaaatacttgcagggccttttctaatttgaatcctccacgggaaacatattttttaccatcatcttttatatgaaaaacttcatcttcaggaaatttttctccacttttatcaattctttgatgattatggtcattaactaatccagccataatagctctttgagcttgactacgagaattaaaaagaccttgttcaaacaacaatacatctgcacgctttttagacatttactataataccttctgatacaaattaaaaaattcacctaataaaggttgttcaaaaacttctatagcttttcttcctgattcaatcatttctacaagttgtttacgactatcttcaatcccaagcaaagttaaagtattatttttaccttctgttgcatccttatgagtagcttttcccgcttcagttgctgtctccactacatctaccaaatcatcatagatttgataagatcttccaaaacgcttgctgaagttgtctaatctattaagctcagaatcagttgcaccagcataaattgcagccattttaacacttgcttcaattaggcagcctgttttcaaccactccatctgatcaatcatcttagcattttctttagctgaatcgttattagttgtatcaatatcaagatattgaccaccgaccattccatttggtcctacagcttgagaaataacaattgctaacgcagctgaattactcccctcggtgatccattgaattcccaacggaagcaacccatctccagctaatatagcttctgcttctccccattttttatgagaagtaagttttccgcgacgataatcatcattatccatcgcgggtaaatcatcatgaattagagaataagtatgaattaattcaattccacatgcaattcttaattctggctcttcaattttatgatttagtgtctcaagagttgctaagaaaagcaaaggacgtagtcgcttacctcccgccattactgaataagacataattttactaaaagttggattatcaatttcagtaaccagatgttcttttaagaaattgtcaatttgaggtgtatatttttcttgaaaatcttttaacttcatttattcttcctcaggagcagacgcattttggggatctaaagccttttcgttcccatctttatctactaacttggccacagtttgttctgcatcatttagctttttctctaattctcggcttaatttaactcctgcttgaaattcacttaaagcatcttcaagaggaacattaccactttcaagcttattaactatttcttgtaattcatttaactgttcttcaaaattatttttcttgattgccatttttttctctccgaatattttctacatttacttgcacttgaccatctttaaaatgtaactttaacttctcatcaatttttagctggtcaactgaagtaactatatttcctttttgatcagttgtataaacgtatcctcgactaattgttttcaacggactaatatcatctaattgttgcatagctcgatttaatctatttctttgatctttaagatagttattcatcgttgaaaataaattcgatactacaaaatttcgttcacgctcaagttgctctaattttcggctaggactgagtgccttaagacgctcttgaagtaaacgtaatgtagatccatcgtgctgtagtcgattgtccattgcctgattaagacgatggatgagcatatcaacttgttgaatttgttgatcataaattctagttggctcttgtaaaactggtgcgttctttaaccgatctaaaatttgatgctttgtatgaatattggcctgaacggcagcataaagtcttgctcgtaattgaacaatttgcgttagtacatcaactaaattaggagttgcatattctgctgcagcagttggagtagctgctctagcatcggccactaaatcagctaaagttgtatcagtttcatgtcctactgaactgatcactggcatctgcatcgcataaatctgccgcacaactttttcttcattaaatggccataaatcttctagtgatccaccgccacgcccaatgattacaacatcatatttatcgccttgagcttgaatttgctgtaaagcagccacaattgtatctgctgcttcatctccttgaactttagcgggatacaaatcaatctcagcatgaggaaaacggcgattagcagtaaccataatatcatgaattaccgctcctgaagcactagttacaactgcaatacgatctggaaatagggggatcttctttttatgttcttcattaaataatccctcctttgcaagcttctcttgcaattgtcttaactgttcataaagagctcctaaacctgctggctccatagtctgagcataaaattggtaagatccctgtggtccataaacatctacatatccactaacataaaccttcattccctcttcaggcttaaattttaatttttcaaaaaatgagcgaaacatcactacattaatttttgatttttcatcttttaatgaaaaatactggtgggaattcattctaaatctaaagttagacaattctccctgtaaaaacactttatgtaaatagggatcatttttaaacttttgtgaaatataaaaatttaaatcactaacagaaagataaactttattatctaccatgttgtttcctcgtcaaaattacggcttgtttcattaaactggcaactgttaagggacctactcctccgggtaccggtgtaattgctttagctttcggagcaaccatatcgaagtcgacatctcccattaatttaccattctcacggttcatcccaacatcgattataactgctccctcttttaccatatcctcagttactaaatgtgctttacccacatccgaaataatcacatcagcatttttagttagctctgataaattttttgtttttgaatgggcaatcgtaacagttgcatcccgttcaactaaaactgcagctaagggctttcctacaattacgctacgaccaataattactgtatttttaccggccatctcaattccataatagtcaattaaggttaaaatactgcgaactgttgctggaattacatcactctgtccttcccagagacgccctaaattaagaggtgaaaatccatcggcatctttttctggggcaattgtttcaaaaatagcccttggatcaatttgaggaggaacgggcaattgcaccattattccattaatacttggatcttgattaaggtcttcaattttttctagaagttcagcttgagaagtattagcgggaaaatgcagtcctatttccttaattcctacttttttagctaagtttcttttaactcgcaaataaattttgcttgccggatcatctccaacttctattacgcataaagttggatttattccgtcactttttaatttttttatttcttctatcaagttctctttaatttcatttgcaggagtttttccttctagtaattttttcacttaatcacctcataaaaaaagtcggctcaacgagccgactcattagttagtctttcttaatgaaattggccaagagaccattaataaactttttagattccttagagctaaattcatcacataaatttaacgcttcatttaaagcagctaccggatcaattactttgctattttgcatttcataaagagctacttcaaggattgccaagtcaatttcgttaattctattaagacgccaacccttttttaaatatttacttaattgctcatcaagtgcttctttatttgctaaaacaccattaactagttctgtagaatagtctgggaaatctttcaattctaaagcctttaaagctttttgacaaacttcctctgcatcagttaatttaccttggttagccaaataaattgcttgcatagcaattcttctcatctcatgctgtgtcatttagtctttagcctcgtcctctttatcatctgggaaaagtgcttccgtgtcagcctttacttcagtttcgtctgcttctgaaaccaagccaactacatgaacattaatttgagttaaatctaaatctgtcatttgcttcaattgcaaagttagatttttttgcagttggacgcatacttttggcacatttacaccgtagtcaagataagtataaacatcagcagttaacttatcgtcttcaacacttagggaaacacctttaccttggttagaacgaccaaaaagagtatcgatgccagtttttagcgtcccacgcatttcgctgacgccatcgacttttctggcagcaattcctagaataacctctaaaacaccaaggtcaactcgggtttcatcgcctttgtcattgcttgataaaagaatcgttgaattatcagccatattttttacctcaaaaactatttatttgcacgagaaacgtaagtaccatcagcagtattaatagttaatacatcaccttgattaataaagaatggtacgttaactactaagccagtttccatagttgcgggcttaccaccaccggaagatgtatcacccttaatattaggttcagtttctgcaacttcaagatcaactgtatttggtaaatcaacacccaaagtttcaccctcatgagtaataacgttaactaccatgttttctttcaagaacttagattctctttcaacttgagcttccggaatttcaagttgttcataagtattagtatccataaatacaaaacttgtaccatcattgtataagtattgcattgccttagtttgaatatcagcagtatttactttagcagttgaacggaaagtatattcttgaactgcaccagttcttaaactcttaagttttgaacgaacaaaggcactacctttacctggcttaacgtgttggaattcaacaatacgccataaatcattgttatattcaatagttaatccatttttaaattcattaactgagatcattgtcatagtaaaattacctcatttctacacttatttatattaccaatcttatctattgtttcgcaacattaaccgcataattacacaaaattataagattaaaagttcatcttttggcaactgtgacatcacatatggatgattatctttaattaaaacatcatcttcaattctaacaccgccacggtctggcaaataaattcctggctcaaccgtgattgccatattatttttcataacttctttactatatggcattgctggcgtacagagttcatgcacttctaagccaattccatgaccaataccgtgaccaaagtactctccatatccttgctctttaatgtagtttctaccagcttgatcgatatctttaccagtatttccagcaattgcagctgcaattccccgtttttgtgcttctagtacaatataatatattttttctagttcaggctctacttggcctaaagcaactgttctagtaatatctgcggtataaccatgataaaaacttccaaagtcaattacaattaattcacctttttgaatctttttatcactcgcaacaccatgagcccaactaccgcggtatccggaagcaattattgtctcaaacgaagggccatctccaccattcattttgaacaaataatctaattttgctccaatagcacgctcactaacaccgggctcaattaaaggcaaaatttctttaaaactttgagctgaaatatcaattgccttttgcaaagtttctaattctagctcatcttttatgttacgaactgtttctactaattcagcatttaaaataaaattaagatcaggacaagcctgcttaagagcctcaaattgagttgcagaaataaattctccttcaactagaacagttttaacatctagctgctttagttggccggcaatttcttttatcacgtccatagtttgcataactaccttcatttcgccaggtgcctgatggcgaatttgatctttgaaacgtgaatcagataataaaacgcgatctccatttgcagttaaaataagttcagcttcttcaccagaaaaattggttaaaaagcgataattagcttgattaaaaatgactaacgcatctgcttgcttttctttaatcaatttagtagttttactaattcgattattaagtaacgttaataactcttgatctgaagacataggcttggatcctcctgagtagataaaaaaagactgaacgttccttagggacgtccagcctgcaaaagaaaattattttgcttcttcaactgggtaaacagaaacttgtttacgatctctgcccaaacgttcgaatttaacaacgccactagttaaagcaaacaaagtgtcgtcaccaccaataccaacgttcttacctgggtggatcttagtaccgcgttgacggaaaataattgaacctgcattgatcttttgaccatcagcacgctttgcgcctaaacgacgaccagctgagttacgaccgttagcagttgaaccaccacccttgtggtgggcaaataatttaagtgcttcaagattattaatcatcataatttgtttcaccccttaattaagcttcaatgctttcgatagttaccttagtgtaaggttgacggtgaccatacttagtgtgtgagtgcttcttaggcttgtacttgaaagtaacaactttcttttctttgccttgcttttcaactttagcaacaactttagcaccttcaactactggagtaccaatcttagttgatttaccatcatttacaagaataacttcatcaaaagttacttcgtcaccaggcttaacttcaagtttttcaacaaaaacgctgtcgcccttagcaaccttgtattgcttaccaccggttttaataactgcgtacatttgtacacctccgaaaaaatacttagactcgccgcatgaggtggaattaacgttaattctcttctaacctcataaacgtgcggttgcagatgtgaggtttccacaaatacaactcttacagtatactctcatccctcttttaaagcaattcaatatcaaaatttctaaaaaaataatagaatattagtaaagatttttaagaaggagtacagtatgatcaaattttacggatacaaacgttgttccacctctaaaaaagcgcaaaaatggctagatcaacaccatattgcatatgagtatcacgatttagtagaaaagccacctaaacaagaagacttgcttaagtggctaaataagtttcaagatagaggtttaagatatttctttaatacatcgggaaaagtctaccgtcaaatgcatttaaaagatcaaatcaattccatgtcaattgaggaagctgccacattactttcacagaacggcaaattaattaagagaccgttaataactgacggtgataaactaacttgtagcttcaaagaaaatatatacgaaaaagtctggctataatccccattgacctccatgaacccgcgctactgtatcagtaataataaaagcgtcagggtcaatttcatgaattttactgattaaaggaccatattcacgcgtgtcaactactaaaagcaattgttttttgtcatcatcactatagccaccaacaacatcataaattgtcaaaccattataattatctagtaacatagttttcaattcattgaaatgtttattactcataatacgaacttgatattttcgatcaaagcctgcttctgcatagttcatcgtcatagatgtaactacctgagacaaagccgctagtaaaaaggcattccatccatcaacaaatatatttaggaaaataattatcatatcaattccaagtaagccaaccgctggattgatataaaaatattttttcaaaatcattggtggaattgttgtcccgccacttgaagcatttacacgatagagaagagagactcctagtcccattaatactccaccgtaaattacagcaagtaattggttattagtaattttaaaacttggggtaatttccatcaggattggcaataataaactacctaaggcaacgttcttcgttgtcttttttcctaaaaaaatggctgctaaaaccaacattaaaatattaacaactaaaaccgttattgaacggttaattccccatactgcgtcaactaaaatcgaaataccagttgatcctcccgcagcaatattaattggaccatagaagaaattaatagaaatggcgataatttctaggccggctaaaaatactacccagcgcatccaagatttctttttaatgttttttgtcatttcatcatccttcctaaaaataagttattaatattttatctaatttctatacaggttgtcagtttcatctcccattcctaattattttttaacattttatattctaattgctggtttccttcataagccggcatgccattttctgctctatacaaagcgcgttcaaatgcttgatatcctttgctggaactaacagcaaattttacatgatatttgcttgcaaactctctaatattccaagtactgtcatgagctgcaaaagctgttaccaagattacaatatctaaatctttaatttgattttcaattacctttttctttccctcaaaagcatcaattggaattgcaataccattgtagcgattaacaataccttctaaaattgcttcgttttgattgtctccaactgcaatcccaactctttgataatgcaaattcatatctaattgtgtcagtttctgcgtattttctcgacttgacttttcttttttagttttagaaatccgttttggttgctcagtttcatagatccatcgaatttgaacggcactagctggatctttcttaagtcttacatcaccggtataccaagccaagtcaacaatcgaaccatcttctaaatgtacacttccattttgatagtaactagaatcaagggcaacaatcaccggcttatgattaattgttaacctttctccgtgaatattacgcgaaacgcttagatttcccggacttccttgtactacaccatacttaaaatcttctattcttgtcataatcacggctgcgcaattttctatagccgacaactcgtaaaacttcagcttcatttaaactatctgataccgggatagattcaacaatatcaccactctttaggtttaaatcgtgtatttgaccttcattaacctcaaaaactacttctccattatcattgattagatctgcacccttcaatgcacgaataactgtataacgtcttcccttgcgatagtcacgtactttttcttttttaggctttaatgcttcttcaaaaatttttctatttactacactactcgtttcttcggatgattgaattgcttgatcaagctgccctagttgttttccaaaattagcagtaatattttgatcaaaagttaatttatgtagtgcgcctaaagctgtctttttagcatctttattgccaggatgctcaattaatttagttattccttgcaaaaaagtatttatttgggcaataatttttggatcaagttcaccgccagttaccctttcactgctttcccctgtcattcccaggactaacttaattgcattcaagctatttttaaggctcttttcgtcgccttctgtactatttaatattctttttaaattatttcgatagtcaaacattttaaccactttcttacttactttttatctattatagcgatttaataatattcaattcaaaatttctttatcaattctatcaataaagtgatatattaaaggtaaaaaataaaaagtgaggaaaaatcatgactaagtacactgttaaattatctgaagaagattaccaaatgttaaaagattgtcattcaaagaatccttcaatcatgaaggctttagaagaagccaaaaaagaagattagactaaacaaaaaaatcgtaattagttaattgctaatcacgattttttatttattttttggacgctcttcgactaaaaagcaacattccaactaaagtacctataattaagtcaataattactggaataatcataaactttcctgaattaaccataaacatatcaagagctgcccaaattattccaaccaggattcctttatacagatactcccacttaaacttaaattttggttgatctacgctcagccaaacaccagctaaaataaaacctaaaaataagcttataacgataagaattacaaacagactaattactctagcagttggtaaggtgcgtaggtttgaaaaatcagttagactttcaaacctaaaaaataaaagataaacaaaccagacggtactaaaaattaatcccagttttattaagcgattaatagaaaactttttcaatttttaagccctccattcgccaccttgaccataagtatgtttatcaagttcattaataattacatgaatatgttcttttggagcaccagtattcttatgaacagcttcggtgatatctttcatcatttgagtaagttgttcatcacttctacccttaattagctctacatgtacaaatggcatttaaaattcctcctttttatctttaatcaaaattataacaaatctattttaattaagcagtccttcttaaaattctccttgcaccatcacggactgcaaagtataagattggagtacaaattgctgtcgaaatcgaattgatgatcgttgccggcaaactaacaaaagagctaactaaagccacatttaaactagttcctaccattaaagcttctacaattgagacacagtaagtagtaaaaattttcgtaaatccagcaataattcctaaaataataatatttttcttactatcttgatagtgcatccccttatatactgccgttaaaacacttgcaactactacgacttctagcattgttaaccacgaagttgcagcgtaaccattaagcaagtcaaagccgcccaatccaataatcccagctagcattccattacgataacctaaatataaaattgcaacagccgttaacgtattaccaaaatgaataaatggacgccctactaaagcaggaactgggattcttaaaacccaaacacccaaataaattattgccgcaaataatccagtcataattattgaaactaatgaattttctcttgtgcgcatttattatttctttccttccactttgttcattaaccaagatagggcacctgcgtagttaggtcccaagcgtttatcttgtcttaggtcagtcttttcaatcgccaatttaacaaaatcacctgctatttgtgcactttcttttaaggaatatctagctaaaaaaactgctaataagctacttgcaaacatatctccagtgccaaaaaatgagcgagtaattttttcattttctattacgaaaatttcactatcgtttgctaataccaccatcttcactttattttctaagaaaatgccagtaattaccagaccatctaactcaaacttttcttttaactcgccagcaatttctttaatttcatttattgaaaaatttctatattccttattcagtaatagacatgcttcagttaaatttggagttaaaatagtcgcgcgctttgcaagttcgcgcattttttctacatattctatatctaagccgctatataactttcctgaatctgccattgctggatcaagcagtattaataagtcagtatttctaaaatcagaaatatgctcaatccaaaaatcaatggcatttcttcccaaatagcctaagtataaatttttaaaagtaattttttcatcttgccagtgagcaataattttactcatttcattatttagcgccaaaaaggtattattaccaaatccaccagtatgagtagataaaattgctgttggtaaaacatctggctgatatccacatgcacctaaaattggtaaggcaacgcttagagagacctgcccaagacaagacaaatcttgactaattaaaagtttttccttcattttatttttctttctaacttaagtcgttttttcttaataccatatcgcttcgaatttaactcagcttgtaataacttattatgccaataaattaaggctactttaattgctaaacgattataccaacaataatcatgctttaaataattaaatgaatctttaagatccagtaagtgctctgctgtaacaaattgatttcgactccagtgccagtccgctgcaccattttttcgaattctaattttttcaatccggccaaccgttaatcttgctcgtcccctaatatacttactccgagctacagtaatataattaccaatcatcgtttttttccagaattgattatgtttcttttcgataaaaagagctcgtcttaatactttacttagacaataccattctttattaccatttgagagttcgattaaacaccaaatatattcatgtcttttttgcaaattttccccaacttttttacttaacttaatttttcatataaaggaattaaatcattgattccttctataataaatttctccatattatcaacattatcatgatcacgaaaggcaaactttcctagtaaaaagctacttttgatagcctcctgatcaaattgagttttcttttcataatcgctcagatattctgctaaagctaaatgattgctgaattccatttcatttttatcccacaaataccagtttgaaatatctaaactagaaccccactttgaaatatcagttaaaagcgtattgtattcactcacagttccctgacgcttatcactcttataatattgaaacatcaaataaacttgtaattgcttcttatcaagcatgacgccaatacaaggattatagtctgctaaggaagttaagcgataactggcccaaaaatgatctcttaaattccacccattagtccagctttcaacatgaacttttgcaaattttcctgtcggtagttgttctgccacatttaattgaactgttttccaaatttgccagacgcctttaaattcttgtttaattgtatctatttcttctggtgttttattaacttttaattttttaaaagaaaattcttcttggtcaaatatctcatacattttattagttaaaactgtcattcttttctcctataatcaatctttaaaaggcacctcctccgctgccaccaccaaagccacctgatgaaccgcctgaaaatacgccagatccaccagaagcagaagaatttaagttagcacctgagtcaaagctagaactaaagttacttgcaaaaccatctttcccatcactgtaaaaagcaccccagaataatagatttgtatcgtcaatttcatctgcaaattctagtttcaattgttttaatacttttttagatacaccaagagcaacggcatatggcattatttcttcccacaagatcagttctccaatatcacgcatcttgaaattaccaatttcatctagcattttcttaaatccgcgaacttgattagttacctctgctcctcttgctgtataagctgataattttttcttattataaacaactgccaaaattgccagtactaataaaattgcagcacatataaacaaagcaatattttcctcattcgaaaagaaggcgctgaacattgcaataccactcaagattagtaaagtcaccatcaaaattgaattagcgtgttgtttatgctcaagcttttcatcaaaaaatcctgctctagttgctttctgcatttcttgttcttgccacttattgaacttctttcccaacttagaggagtggtgttttttaagttcgtatgttgtaaaactcttgccatcgcctactttatcaaataagtaattcaacaaaggtttattttttattatatttttatcaattaaagaaattttgtagtacgttctttttcttatcttgataggatcaatcttaatctttttttggaccgctaattccattagagatgcagttaaagacctagagcttggctcatctcctgtatctaaaatttcagccattaccggtgagactgatggaatctcataattcctagccagttgcttttctttttccggtttaactccggacttttttaaagtaaagcttctaataattgctagtaaagaaaatagcccagatattaccaaagcacctaagcctaggattctgtttctttgacgccgttcattagcttgtcgtgcaaatcttgcttcttgatctaaaacatattctttatgattttgatctttaatattcttattttgattagttacctcaacaggaaacagactatggacctcaattccttcatttccacctacattagaagctgtcatgataatattgcctttttgcggattaactgtaatttggccagacaagtctccatgcgcccaagcttttaagtctttaactgggcccgggaagaaaatacctactcgtacattatctaggtctgtatcccatccatctccaataatcttaaaattaagttcagctgtatctttccagttcgtgattgcatttgtaatttcataagtataaattactgtaaatttatctccatcccttacgctatgccaaactttaaaacgatagccatgatcactatgacttaattcataagtattattttcataagtcgcacttggtactaccatttgtgaatttttgtcagccagaattctaacctgcggattttttaactcttgattattggctaaattttgctgatagaaaataccatgagcgtcatcatcaaatttataggttatccttctctccatagataatgaaccatttggattaactcgggctgtcacatcaacatttgtaatatcataattcacatcggccaagactggtttggtaaaggccataactgaaattaaaaaaagaatcatttcagtcattacataaaaaaattttttcatagaatcctctaacaaaaaaagtgagtttttgcttaattataacttaatacacgaaaaaagcactagattttattctagcactttaatagcaattcaatttaagcggtaactttttgttttttatgaatatattaatagggcaacaacgattccaatatttgaaattatcgatagcattttaactatagccttttctactactcttttacaatatgtcttctaaaaaatgctgcttcttcgtcattagcttccttcgctaattcatctttttgattaattagaaaaacatgcggttcgggatgcttttcatcaccccaagatttttgaataacttctatgcctttagcccttaaaaatccatctaatcgtactgcacaatcatgaataaagtcttcattagctgttgaaatgaaggtaggcaaaaagcctccagtaatatatttttcaacatcaattaagtcctgattcttagcactcttcattacttctggatcaaagtaagccaacgtagcgtccatcatcatccctggatccttcataaaagtagctggtgagtttaaagcaactgctctaaacttcaaatcagggagggtatagccaaatttttctcgatataccggattagtcaaaatcgctgtgtattgttcagccatttgaccaccggcagaatccccaactaagaaaacattgtttttatcaagattatattcatctgcatgttttgctacccagtgaatatattcattgacttgatttaattcttctggaaactttacttctggtcccaacttatagttaggatttataaaagcaaagcctcgtttagccattcctagtccataaaattgataggtttctttagtaccgtaaacccaaccacctccatgaatattaatgataacgggaatttttccttcaatatttttcggtaaatatatatctaataaattccatttagaatcgttaccatattgaatatcatctacacgctttatctccggaagatcatggggtaacccactatctcttttatcatcgttcttcttccagtcaatacgcattttttcaacagcttctaaaatatcttgttctttcataatcgtttcctctcttaatgaatttgcttttttattttggatgcactttcaccatacaatttattaaaggctcgattcatcattctaatactcgaaaatccattattaattgcaatttgggtcagattattctttgaatgttttaactcatgataagcatgctcagccctgacattattaatataggtttctactgttagttccatttctttcttaaaaaaacgagctaaatattctttagaaatattacattgattagcaatcaccgttaaatttaattcttcttgataatgattattaacgtattgagtaatatattgcaatcgattaatgatataaatctttcttccactgatacgttgctgatcgcttttctcttcggtaaaatcacttaaaagtaaacacaaaatttcatcaattaacctttgctgttctaaatatttagtaggaatatcgagaaaataaactttgataaattgaccaagtaaactttgtaatctaaggtaagagattttctgtttactatcaaatttagttggatcattaattttaataatttgatgggcaatcgaaggatacagaatttataacataatcatagggaaaaataattgacaaagctaatgcattatcgttttcaaaatcatgaatactatgtatttcttgagtattaactattaaaattgttccggactccgaggaatagtgttccttattaattaaaaaatcagctattctcccatgctcaacataacttaattcaatcccgcgatgccaatgcggagcaatatatttttcagagttatgatcatgaaaaataaaataccaaaccggtaagggatctgtaggaacaactatttcatgttgctttatttttttaccatatgtcattatagtttttcaccatttacatgtataaaaagattatacaaagcaccatagaggttagctccattcttaaatttagcctctatgattttcggccgagtaaaagtttctctaattaatgtattaccagctaaaaccttatcatatgcttggttaattccttctacaacaataggctgtgcagaaataccgccgccaatggcaatcgcatctaaatcaacaactgcttgaatatcaataataatggtagctattctcttgcaatattcagcaaaaatttttctagcctcttctttccccctattaatagcttcaaaagctgctaaaccatccatttcatcttcattattaattgcacggtttaccctttttatcatttgaactgcagaagcataaccgccggcaaacccattaaaacctgcttcgttcatattaagttgcaaaaagcttaattctcctgcctgaaagtgtgctccatttaaaagttgtccatttacaattattcctccttcaactcctgttcctaaggtaattgcggcacaattcttcatgtcttttaaacttccaagccaattttcagccaatgcactagccttaccatcattaattactgcaactggaatattgtatttttgatacctttcggcaaaatcaattccatcaaggaagggtaaagtcccatcaaaatgaatttttgtatgggcaatctttcctggggcacaaaatgccaatccctttactccctttttgatatatttttctacaatctgatcaatattttccagaaactaatcctttttttgagaagtctttatttttccttcttcaataatatgtcctccattgtccaattctgcatattttacatttgttcccccaatatcaatacttagatagttctttttcatttttatcctctccctaaatgtttagcgcttacattaaacattttatggtgtattttcatctaaaacaagccgattattgatattttttattccaaagattgatacacgagcaactaattcattgcaagacaaaaggcttacttttgaataaaatcaaaaaattgaattttttcttttcttataagaactatgttttagcttggattataaaattcttcctcttaaggaaagtttttacagaagaacctacttttgaaaatttatatgtctttcttaacgtagctctaaccaaaattcgttttttattatcatttgtacaagtcaacatagttaaaaaattactcttagaattaagtgctagattgacctgagttggaaagataatatgaactgattctattttatattcttttactaacttaaaatcagtaataaaaacctccctatcaatcagtttattatttgcaagtggtgaaaataacgccttactaaacgatccgaggttgtgtgccccaataataatatttgaattactatctatttttcttttgactaacatccctgcaccaaattgataaacagcatcatttgtattttctgctaccggaacctccatatttaaactaggaacaataagaacttcctgatatttaatatcatttatcataagtaacatatggtaattttttagtggtataaaccgatttttcatgcaatactttacgttgaagatcgttaccaaaattaatagcgaaagatataagaataattaggatacttcctaagtaccaaagttttttatgtttcataaagttttctccctataacctctattagttgatttcccaagaatcatagcaagctattagtaataaattatattttttacttaaatacatacacgaagtaaacgtggtaaacatcatatgccaaacttacatctacagacaatttaatttgacaatgtctttctccaaaattagctttattgatggaattaagaaacaggaaggcaagttaatatatagatataagaattaatagtgctttagaacaaattcaatattggtctatttgagacaatgaaagcaattccttttagaaaacttacaaaccgtgatataataaaaaatcctcatgttagctctcgaacattctatcgatattttaaggatgaaaacgacttgctagagaaggttaaggacaatcttatttatgagcttatgtttttttaaaaaagggatcgtaaaatgctagaaaaaataagcttctgaacatagacgcaaatagttatcatcatactttaacgttttgtgcaaagaagcgaaaagaaattctccttcttctttcccaaaatggagatattggttttctaattaaaataaaaaatttgggaagagaagaacttaaaaaagatttgaattaacaaatcgaaaaatcgaaaataatttttatctagacaacaccgtagataagaatctaaatgtagttatcaactggcttatctattatgacaatctttcaaaaaacaatattagcaaattattagctcaatccagtctgcaaaatctttaaactttacgtaaacaaagtgtgtcgattataaaccgatagattgttgagtcgaagatatattttccactaagataaaaaaggtattagaggtgtgtaagaaaaatgaaaaatataattatactcaacaatgaaaaagaattaataaatcaaattcaagttttgcttgaagaagatcgaaaaagcctagaaactatcaatggtataatagctgaaacaaaaaagaagacagttaccctatcttcttactcaaatacattcaaatatttcaaaaaaaatcgtaattacattttatggttgttctacgaaaataatcaatcctggctacaaataagagaaatttttgaaaaagatcaggaaaaaaggatcaaccttatttttcaaaaaatgtgtctaggtaagacaccaatctattgtgttctcagtcaaatttgggtaaaataccagactgataaaattatagactatttaatacaacaactacgctataaatagacgccggaaaatcaaatgtacgctcttaggatgatcatttagatttcttaccctacttttacctagtaaaaagactttctttctgtaattcaataagccagaaagaaagtctttttataatttaaacttatttatttaacatatacttttgctaatcagaccaaagataagttcgatttattatagtccaatgtgttcccaaggttttaagtcaatagctggctcttcccagagtttaactaaatcgtcagacaaatatttcttatcaacaacgacatcatacacatattcttcaaaccacttctggctcatttcgtagaatcctttatggccatacttatcaccccaagaattttctactttccatttgcgaatttcgccattatcttcatctacaccgactaaggtcatatcatgggttgcagctccttcaccagtagctaaacgatctgctttactcatttgagtatcaacactaaatagatcatccgttttgtataattcagtatcaagaaaaccagtcttacgttccatctgctttaaaacgtcatttccaaaaataactgcttttccatcttttaattgtgctgcagctgctcttgctaacacttcaattggtacatttaggccagtaatcggagtaccaccagccacattatcgtataaaccttggtgatagcgtttgttgtaatcataattaggtgaattcaataaaacaacgtaatcatcccaattaaagtcttttaaatatttttcagcaaattgacgtggcgttaaatccttttctaaatgatatttcttatcgtcgtctcggtactctaaatcaaatttcttaggtggctcacccaaagcaactgctgccattcggtaaacctcatttaaaaattccctcttagctttttcagcttcttctagcttaccttcttgaactaatttacgaagtaccaaagcatcttttctttctttacgagctaaggaatcgattaaagcactagtattatttgaagttgcattttctggcattgcatatgatggaacaacaccatattttttaaccagattaatagccatttgccacaatccaccatcttgacctgcaaagtcaaaccaagtttcgacttcacgatcatcaattggtttatcagctaagcgaatcatactatcataaaaagcatttgctctctcaatcttatcccaaaagaaattataagcttgtgagaaagtaaaatctttaacatgatacttttggccaaaatgatgacgcaaaacatttaaagtagcaaattcccaacaacgtccagaatgcttttgatcagtaactccaccgatatctaattcagttgaaaaagtgtgatttaatcgctttgaaacttcatcattaaatgatgcttcaaataatccacttcgacgtgcagctctagaagcaattttatttttatcatttttgttaaagtctgcagaaaaagccgctaattcttgttcagataaggcacccattatatctctccttttgtcttcatcaatttaattaattttaatcttacattaatatagaaaataagcaagttttataacaaaaaagactaagtattcttaaatacctagtctctttattaaataatttaaaatgtagacagaaaaatatcttttctataattattcaaaaatttcatcaatatcaagtactactacaaatgcgtttggcgtatcggtaccagaaacaatcttctttgcatattcatcatcttcatgaacatgtggcgtagccaaaacttgaacagcagtatgggatggtacatcagctgctactaatgctacttttgaaccatttttaatattttcaaaagctgcacctttagttttttcaagatattgcatatgagatgggtctaatactgtcattgaacctttaggaccaacttgtggattgccattttcatcaacagtagcaatgtaaactaaattgttcttaaaaaggtcagcttgtttatcagttaatttatttgtgtttaattttttcatagtatatagttcctttctactactaatcaattataagtataggcctatttaataaaaaaatcttcttttttgctcaaatttttataatatttaattaaattaaataacatttataccaaatatcaatctatataaatagctttttcttttttattgtcttattaatgagtcaaatttaataacatttagcttatatgaaatcgttttatttttcattaacatcaggaattttttattccttatccatcttgataagcctcattaagctataaataaaaaattatattaaaaataagaaaaatataatttaatgttgacttattttcaaaacggcgtaatattatggtcacaaacattattatcaaacagctttgataaggaaaagtaattaggaaatcgtctttcagagaatttctggttggtgtgaagaaatagatagattcttaatgaaaatcacctttgagcgtaaactacgatttagagtggtttaagggacagccctttatagcgacggcgtatcgttctcctgtattgaaccgtacgttaattaaagactagttttctagtaaaaataggtggtacagcgacaagacgccctattggatcaaattgatctaatagggcgtctttttgttttcttaatcatgctgttagtggatttttgacgaaaggagattttatatgaagatgtcaaagtccaaactgctgtatgtaactctcgcaagctctcttacgatattcgcaactgcttgtggtgctaagaaaactgattccagtaatcagacaatcaagttttctcagaatgtccccaagaaagccattaaaaaaggtggcactcttacctatgcactagaaaacgaatcaccttttactggaatttttctctcagaaattgctgataccagtccagatgtagaggctgccgctccgggagacgagtcactgttttcaatcaatgatcaatatcaaattactgataaaggagctgccacgttaaaattaaatcatcacgataatacagctaaaatcaaggtaaaggacaaagttcgctggtcagatggtaaaccagtagttgccaaagatctagagtactcttatgaaattcttgccaatcctaaggttcaaactactcaatatacttcttcattagaaaatattaaaggtatggctgaatatcatcaaggaaaagccaaagaaatttctggaattgaaatgccagatggtcctaacgggaagacattaattcttcatttcaaagaattaaaaccagcaatgctaaatgctgctagtggtttttactgggaacatgccgctccttatcactatttgaaaaaagtaccattcgaaaaattagtatctagtgatcaagttagaaagcatcccctctactttggtccttacaagatggataagacagttcagggtcaatcaactagctggtctagaaatccgtattattggcgtggaaaacctaattttgctcatatctacatgtcaaatattactaattcaaatgtttcccaagcaatcaaaagccacaaatttgatgtagccagtgttttagactctcaatggctgcaagtcaaaaatactaagggagttaatttcgttggcaaaaagactctcagctacaactacctagcctttaaagttggtaaatgggatcaaaaactaggaaaaaatgtagaaaatcctcatgccaaaatgaataaccccgccttaagaaaagcaatggcttatgctatgaatgtagatgttattaataatcgtttttatcatggcttaaaattcagagttaattcactaattccttcacaatttacgccatattacgataaaaacattccaacttattcttataacttaaataaagctaatgaattattagataaagctggctacaaaaaagctcctggtgccctttacagacgtcagcctaacggtaagcctttagtaattaatatagctgtgcgtggatcaggcgaaaacagcgaggcgatctggcgcaactatatccagcaatggaaaaaagccggcctaaacgttaagtttcttggcggtcgcccaatggaatttaatcgctgggttgccgcagttaaatctagtgatccaaaaattgatgtacttgaaggaagctggggcgctgccggtgacccttctccaagcgtattttatggtgaaaaaatgccatataactttgcccgctttgtgtctccaactaatactaaacttttagatgaaattgattctgccaaatcttttgataaaaattatcgagtacaaaaattccatgaatggcaaagatggatgtacaataaagcttacgtcgttccaactagtggagcttactcggttactgcagttaacagtaaggttacgggatggtcattaaaaccatctgctaatgtttggtatgaagctggctttagcaaataattcataaatcacaactaatcaacatatataactttaatatcgacttgtcctaaaaatgaagtatctataaatggatacttcattttttatttatcaatttttagatatcgaccatgctcatcgactacgcctttaaaatgatacttttgaccatcttgcactaaaagttctcccaagtcgatctcaccgtaggctttatctgcatccgtaatagttacatcattaaaagtgtgttcaaaaaaatttctcacaattttactttttactttaatatcttttgagcgctcaaaggctgcagataaagtaaatccctgatcaagttgagttttaataaaaataattaaatataaagttgaaagagtatatcttctaactccactttgattatcatcgaccggcttaatatatcccttttcttcccaataccgtaactgtctttgcgaaacaccaaccgttttacttacttcgcctattccgacttcaatattttgaaacacatcatgaaatatcttttttgcttccatttttttatccttaaatatcataatctcaattctagtttaaaatcttatgacagttttagcaacatatatgtcaaagataattacatgtttgtaagattatttgacaatcattttctttaagattatagtttttatagttaaattttaatattaataacttagaaaggatcttcaaaatggataaacaacccaccgatattcatggaaagtcctataatcgaaacttactggtattagttttaattattggttctttctgtactgtgttaaacgggacattgcttgctactgctctaccttcaataatgcgttcctttcatatcagcactgcaactgctgaatggctttcaacagcatttttgctagttaacggagtaatgatcccaatttccgcatggctaatcaatcgctttggatcaagaaaaatgtacttgagtgcaatgtctgttttctttattggaacagttatcgcagcaattgcaccgaactttggcaccctacttgctggtagaattattcaaggattaggtgttggagtcacgatgcctcttcttcaaaccattatgctttctatctttccagctaataaacgtggggctgctatgggaactgttggtattgttatcggcttagctcctgccatcggcccaactttatctggatggatcgttgataatctttcttggcgctacttatttagtattattgccccaattgctggcgtggttattatattagctttctttttaattaaagatgtactccctactaaaaaagaaaaaattgatattttatctgtaaccacttctactgttggatttgggagcttactttatggtttctccgaggccggcaacaaaggttggactaatccagaaattttaatgtttattggtgtagggatagtatttgtcatcatcttcggtcttcgtcaattgaaaatgtcagatcctttcttagatattactgtgttcaaacactttgaattttctttagctgcagcccttagtggtattacaaatttggccatggttggtatcgagatggtgctacctttatatattcaaaacttacggggagtatctgcatttcattcaggtttaatgcttttgccaggtgctctaatgattggaattatgtcaccaattacgggacgtttattcgataaatatggtgcccgcaagatggccattacgggaatgacccttttaacattaggtacaatcccatttgtatttttgactgagcaaagttcctataccatgattatcgttttatatgcaatcagaatggtcggagtagccttagttatgatgaatgttactacttctgggatgaactcattgcctttagacaagatttcacacggaactgcagtaaacaatacatttagacaagttttaagttcaattggtactgccattttagtctctgtcttaactactacgactaacaacaacatgccaagtaaagaattactgaaaactttaccacttcaatataaaaatcaagctattaatgctactttagatgggttccatgcttcatttgctatgagtattgtctttgctttaattgctttggttcttgctttcttcctcaagaaaggtaaccgtgcccgtgaaaatcaagaagaggtgaatggataatgataatcgtaattttaatcttagcagcaattttatttatttacttcaacgtcatccctggtaaaggacatactataatctcctggctttctttaactgttacatcactttgtattctggggattgttgcacatgactataatcactggggaatgaagactgagacacaaataagtaaacaaagtctcgtctcaagtgctaatcccaatcttccccttctactttatcaacctctaggtaatggtacagaaaaagtatacttatataaaactaacaatgaacaaaaaaagccaaaggctattaaacttgataaagtatcgaccgaaattaaatatagcgcgcaagccaatcttcaaatagaaaccactcgatatgtttaccgagataattttagtcgaattatgtttggagtctttagtcataataatgaactcaaacagagaaaatatatttttaccattccatcaagctggaaagtaatttcaactaaagatatgaaaaaattacaaaagcaactagaagaaaaaatgcaggcccaaaaagctgtaggccttcattaatttttatctatatcctaaaaaagaaacgtctatacggacgtttctttttttactttccttttccattttcataggcaagaattttacttgctaaggaaaattctttatctaagtcttttaaataaagatcattttcatttttaccaacattcttattaaacaagccctgcgcttgtgtatcaggaattccttcacgcattttttctatttttaaactacatactaccgttggtacatttgataatacttcgactaattttaaccataaatcatctactgtaatgtagtgcttaatataatctaaattaaataatagcttttcatctaatagatgaggtgggtataaaacactgccagcccccgtagctaataatttcatcgatggctgttcatacttttgactgcaccaattccaatcatcatatgctttaatcgatccatcatcattaaaagttatttcatgtgctcttcccgtgacaatacatttcggaaattttaagtacgttttatataattctgatagcatttctttgtagtaaataacatcatcatctactgtaacaataatatcgtcaggaaactcttgcatagcatagtaatattttttatgcggttttagatctaagggaacaaagcgatattcaattcccctatcgcgtaattcaagaagagatgatggaagatgactttctttaatatcatcagtcagataaactaaaattttatcggcttttttagtctgattaagcaaacttttaaggcaaatagatagtgtattcaacctatccccatagcttgtcaaagaaacaattatccgaggattcaatgcctttttcatactgctcatccctttcagtttaatattattaataattatctcttgatagcgttttataataaattaatatgctcattatttactatttttaagacccaatttataaacaaaacaaaaaagctacaatcatttctgattgtagctcaacatgatcttaatgaagaaaaataaattgttacacttcttaaaggagaagttttcggatcagtcatctatatcttagtccatttttcttccattgttaaatccaaatctttaatataacaaatatcggttcaagttatctaatgagcaactttctttgctttagcattaactctaattagactagcaatttgatcaatatctgcattattttgggcaataatcaggtctttgtttgaacgtggataatcaatcacttgaccatgattggcagcaaaagcttgtaaaaataatttactgcttctcccatttccctctctaaagggatgaagataatttaatctatccagtaaaaaagcatagtcaacatttgcaagttcttttttagaagacaattgttgtatcttttcgtctatttcttcaattccaaaattaatacgagaatactctaaaaactctgtctctcctttaactaattcataatctctaatttgaccagcccaatcgtaaagccaaccaaacataattttatgaatttttttcaaatcttcaacactagtgattttcttattctttctcaaaaaagccacggcccgaattcctgagcctaagtattctttttgtgctaattctgccgcatcagtaatattgagcttatttttaagcgtaccatttgggtaaagaaatttttgacgataccattcagaatccttttcggcctcattcattttcttcaccccaaatccgatcaatttcacttttaatctccttagatggattaatcgcctcatcaagtagcattaaaatatcctcttcatctggttgccaaccctctaagtgttcactttctacaacaaatctaatttgttcatacatttctggatcttcaatataaatgccttgaatcatttgattagtgtcattaattttcaaagaataaactggatcaagtaattccagtaaatctcctggtcgcatatttaaagatgacgataatgccgataaaattgtacttgaccaattatctggattctcattaagtgcatcttctaaatctttttccattaaagaattactttgtgaaatatcctttaaggttaaatgatgatttgtaagtaaaattgatatttttgataacataattgccctcgttcatttttaccttactatatttatatattttaaatcaaaattggatttttcactaaagaattacataaaaaaatagagaattagcacctttagaattcctaattctctattttaataattaatctaaattctattattcaactgtaacactcttagccaagttacgtggcttatctacatcaaggcccttatcttttgatgcataatatgcaagaagttgagctggcacaacagttaatagagcagacatataatagttaatttctggtaaaactacattgtccccttctctagcaaagtctttaccagcaatagtaacaacgttagcacctctagaaacaacttcttgaatatttccgcgcgttaaatcagctgttgcaggatcattaattaaggcaattactggggtatctttttcgataagagaaatagtaccatgctttaattcagctgctgcaaatccttcagtttgaatatatgaaacttctttaagttttaatgctccttctaaggctactgcataatcaattccgcgtccaatgtagaaagcatttcgagacttaattaggtatttatcagcaatctctttcaaactttctttactgtcaacaagttgctgcatcccttctgctgcaatacctaaatcatgctttaaattccaatctttagcttctgctttattaagtgcttcgcccaacgccttagccagaactgcttgaacagcaatttgggcagtgtatgccttagtagatgcaactgcaatttcaggaccagcttctaagagcatagtgtagtctgcttctcttgataaagttgaaccttctacattagtgattgttaaacttgggatattacgcttattaacttcttttaaaacaacacgagaatcagcggtttctcctgactgagttaagaaaataaagaatggattcttactcatcattgggaagtgataaccagcttctgaggccaaaccaacttcagttgggattccagtataatgctctaacattgtcttaccaactaaaccagcatgataactggtcccagcagcgtaaatataaatacgatctgcttttgaaatagaatcaataatttttggatcaaccttaacatcatcattttcatcaaaataagtttgagaaattttacgcattacgcttggttgttcatcaatttctttgagcatgtaaaattcgtaagttccctttgaggctgcattaggatcaatatctaatacatggggcttacgttcaacctttttaccatcaacagtttcgattgtgtaagaatctttagtaatgtcaccaacatcaccatcttgtaaatcaacaaaagttttggtttgatctaaaacagaaattgcatcagaagcaataatattaaaaccatcgccaagccctaacatcattggtgacttgtttttagcaataaaaacatgctctggttcagtatcatcaactaaaaggaaagcatatgaacccttgactaattttaaagcttctttaaacgcagaaaaaccatctaaattcttctcacgcgcaatcttactaactaattggacaactacttcagtatcagtattagagtggaactttacatcttgtaagtatttttcctttaattctgcataattttcaataacaccattatgaactaggtaaaaacgcttagtttcatcaaagtgagggtgagcattatccactgttggcttaccatgtgtagcccaacgagtatgaccaattcctactaatccttgttcatcaggagttagtttttcttttaagttagaaattctaccgactgcttttgttaaatattcgtttccatttaagtcatttaaatatatacctgcagaatcgtaaccacgatattctaagttagttaagccatttaaaataatatctcttacagattttccaacaacaccaacaattccacacataagttttctcctttggtatagttcatttaagttaaatggactatatttattttgctgttatactagcaataataaccctattaaagaaattggtcaagatgttttatctataattggtctatatcaaaagatgaaaaaattgcacaaaaaaaaagacgctccatacggagcgtcatatcagtgatttggtgctcataaaaaatatatagaaaagcttacatttttctttgcaatccatttcatctttattcatcaaatgaaatacgctactctttcacctcatttaaattaatcacttcattagccaattgttttatttcttctcttagatgatgagttaccattataaccgttgtattcttctttgataaaattgccttttcaagtttaacactagcagacttatctaatgcagaagttgcttcatctaataaataaataggtttatctcgcagaatttctctagcaaatgaaatacgttgcttctgtccacctgataattgctttccctgatcactcaatacagtatccacgccattggaaagtttagcgatcatatcttcaaggccacattcatgaatagcgttatttattttagcatcaggtatatttttgcctagagtcaagttccactttaaagaagctgaaaagatataaggatcttgttgtaaatatgatattttttcatgtaagtcattgtctgaaattgctgaatagcttatatcattcatttttatatcaccactattgtttcttagtagtcccgcaactaaattaagaatggtggacttaccggcagctgaatcacctaccaagatgtatttattattaagctggaaatctaaatttaaattttggaatagaggcttatcgtttttagaatatttgtatgaaatattgttaaattttatattacctaattctacatttttaaatatttgctcattatccttcttatcaaatcctgatttgaatttctggataatcggtttaactgatttgaactcttgccaattaaaactaataccacttaactctgcaaatatagtgccagcaaagaactgggcaccgctaatggttcctaccggagtcaaattatgcaatattagccaaccggtttgtcccaaaataatcacctgactaataaatgccaacccatttgtaatagcctgtgtgatcccagctgttttagcatattgtacggtatgctttttaacatcatctgaagacttattaattttcgttacgatagtctgaggtaaattggcaagaaaaagagtattaaatccatttagtatatcgtttattgtattgactaagcgttcattagcatgggtatattccaaggattttttagccaatatttttgagaacagatttggaacgatacccataataattgtcaaaaccaccacagtaattactagactgaaattgaagtaggctaatgttaacatgccaaagattatttcaaacacttgcctgacaatcattagaaaatcagcgataccaaaattattaattgtagttatatcattggttagccatgaactataggtagatacagtttgcttatgaaaagtagcgtaattagatcttgataattcagtagcgatatcttttctaattaacttatctacattttgtgagaatttagcttgttcaatattaaccaaacaatttactattgcgtaaacaatgtaggctaatcccattactgcaacccacataaagaattcatttgctctaaattttgcaacagcactcaaggcatttgcgctagagataccggctaaagttagaaaacctgcattaacaactattagaaataccacaaacaggaattcccattttaattttctaaaatattttaataattccatatatactccttggtttattaaattttaatttaaataataaatataaaattaaaataaatcaatattttttaacaaaaataaaataagaatcacaccataaaatctacttaaaattaatctattgatgagtaattgagaatattaagagttcaattattagaaaaattatgtcataaacgaaaacccgatagcacaaattgcactaagtggtcaaaaaagtattactttttgaaccggtaatacttttttagaattccttgtatctctttgctgtaatttaaatgcagtatatttaaagcttgttgcaaaatcactgatatagttcttttaaaaataatttcattaacttaaagagagcaacaaataaattagcttgggggtcatttgggtgtcaaataaaaaattgcacaaaaaaagacgccccatacggagcgtcatatcagtgatttgggtgagattcgaactcacgacccacggtttagaagaccgttgctctatccagctgagctaccaaaccaaattccttaacagaacatattctagtatagggaaaagagacttatatgtcaattacttttttgaatttttttgattttaatttaaattttttatctacaccatttttaagaatacaaaaataaggaacaacaactaatatttgtcattccttttactttaaatcaacttatagtgcttgcatgcattaaagatgccatctgcatcaatattagtagttacatagtctgcaatatgctttacttgctcttcgccgttccccattgcaactccaattttaacagcttttaacatttctaaatcattttccccgtcaccaaaagccattgcatctgctaaagtttgaccttgcaggtctaggtacttttcaataccagctaatttaccaccgtcttttgagatgatatctactgcgtattcattccaccaacttaatttacaattaggtaaatcattcactaaattttttaatttttctcgatctccatatgcaataaattgatagactttttctccgtggtattcaccaacgggtgcaaccttacttgaaacagctttttgagcagctacaacctcatcagttacaaaattaatataagggccttctttaccaattgtagtaattggaacagttttttctttaattaattggaccattttttcagtatccttctcatcaattggattaccaaaaatttcttttccatttccatctaaacaaagttgaccattcatcgtcaaataaccgtcaaatttcaaatctttgactggtaattttttcaattgactcatatcacggcctgtagctagcactaatttatagccattttcatgtaaaagtttaagtgccttcctagtactttctggaacgctatcagttttatgagaaactaacgtcccgtccacatcaaaaaatattgtttttaccaaatcatgtcacctctatccttcaaattatatcaaaaatgcgctttcaaaaccgaaagcgcatcttttaattatttatttttcaaattttagtcaacagctttagcaattgcagcgttaacagcagcctgttctctcttaactaagttaaccttagtttcaattaccttagtatccatcttaatttcacgagttaagcctggagtattgacctttggttcaaagaagtctttgaattgattcaatctttcttcagtatggaaaatatttgcagttacagtaataaaggttgcaaattccatatctccacctacagttgcttcaagccatggccactctaatctaatccagttccaagcttgttcttgaccaaatggattagctaaaacattacggtaccatgcacgtaagtcttgtggcttaataatttcggaattttcaaagtcatcaacaattgcatcaatgatttcaggcattttagttgaagtaataccagcacacaagtcttgcttcaaacttgcatcagaagtttcttgatacttcttaagaagtttatcaaataaggtcatgttaccaaagttcttaacctcgttaaccaaaacagcacttctaatatcagcggaaataccctctaagttatccgaattttctgaataaatagtgtgcagaccgttaattgtctcatcattaccagcatataaggaagctgcaacaacatatggtctagttaaattatcatcattagattcaccagcttttggaagtaatcctagacgcttaacttgtttttcagaaagtaaattataaagcttctttagatccttttcttccttagaatctggagttacaaaattacgtaaagtagtcataattctgtataaagcattgtttacaattggtgaagtagaatctgcaaatttaggaagaagtggaacaatgtctgcataagacatatgaccgccttctgctaataatctgaagtcttgtagtaactgtaatttatcaaccgcatctaattcatcaatgtggttcaaaatatcatcaagtaaggtcttatcatatttaacaataaagtctgaattgttgcctacatttaaacggaatggaacaccgttgtcagcaattaaatcagcatagtcaccaacaactaatttttcatccttcataatctttggaacagcagcatagtttgaatttagtggaatttgccacttacgtcctacttccttaccttcaccgataaagaattgtttttgagttaaaactaacttaccatcttcaacttttgcatttactactgggtaacctggttgttcaagccatgaatgcataatcgcaccaatgtctaagccgcttgcttctccaagcgccttccataaatcatccccagttgcattaccatatttatgagcagcaaagtagttcttcaaaccttcacgaagagcttcatctccaagtaaggcacgaaccattactaacattcttgatccctttgcataaacaatggctgagtcaaataaggcatcaatttcagctggatcattaaccataacatgaacagattgaacaccgtctgttgcatccctttggagagctgctggaacttctgaagtttggaacatttcccaaatcttccaatttggttctaaggcatcaatagccacatattccatcatattagcaaaactttcgttaagccatagattatcccaccacttcatagttactaagtctccgaaccattggtgagctaattcatgagcaataactgtagcaactaattgcttcatttctaatgaagtgttgtcaggatcaagtaataagtatgcttcacgataagttacacagccccagttttccatcgcaccagctgaaaagtcaggaagtgctacttgatatgaatgctctaatggatatggagtttcatagaaatcttcaaagaattcaattgaacgcttagcaatatctaaggcaaaatctaattcttttgcttggtgagctcttgtagcaaaaacaccaatttcaacgccagattttgtcttagtcaattttctttgcatatcaccaaagacaaaagcaactaaataactagacatacgtagagttggtttaaagtagtgaacaccatctttaaacttctcttctggttggttagaaataatactttcaccagttttttcatcaaacttaattgcaagtgcaaaagtagcttttgcttctggttcatcaacacatgggaaggcttgacgagcaaaggtggtttcaaattgtgtaccaattaattgcttcttttcaccatcaacttcgtagtaagaaggatagattcccatcattgtatcagtcaacttaccttcgaagtcaacttcaattttcatcttacctacttttccagcttcaatattaattacttcatctttatcgttgtaattaaagtcagccttcttttgatctactctaacagaggtaatctttaagtacttttgatttagcttgactaattcttcttgtgcttcaccgattacaacagtcttaccatgaaatctcttcttttcacgactaatatctaaatagatatcatagtgttccggataaaaagtttcataaaagcgttttacttctgtcatattttgacctccaatattttaacttctcaactatttattataagaaattaaaatcttacttaccagtttttggattaaattaaaaataatttaggctatcctacataatttaaaatattgtttcattcttcttttattcaattaaaactagtaaaataaaaattaagagaaaagacaaaaaaggagtgctttttataatgaaatataatcaatatggttatctaaaaacagactttgaccaaatggttaaagaactacaatctattaacttcttacctaatgattggaaagaaaatagtttttccggccttttagcaacactagttgaaaactccgttgccgaagccaaaacttatggtgcaaaagaagccaaattagcagaatttgcagttagcgatcataaaaatttaaaagattttctagctgaaaatcctaattcaatttcacgtaaccaattttataatattgccttgcaattactcggctatcatgttggctacgattatgacttaaatgatccattagcacgaatgaaggctaatgcccttccttatactgatcaagaagaaattgatcgtaatgaattagttaaagtcttctaccgcctacttaacactcgcgctaaaaatggccaaactttcattgataatatggctggcaaaggttacttcacccagttctacggtaataataaatttatgtactttaatggtaagtcactcccagtttttgatatgagtaaggttattcgtgaagtggtctacgttgaaagtgatcttgatactgatgaagatggtaaacctgatttacttcaagtcaccgtctttcgtccttaccaatcaaacaactttaagtttcctgctctctatacagcagatccgtactttggcggaattattgctaatgaaaaacgaaaccacaatgtagatgtcaatctagaagacgctactaagagtacttaccctaagtatgaagcaatgcctactgctaaagctcaaaaacctgctagtgaagatcaagccgctacagaagaagcagtacacaaagcagcctattctctaaatgaatatttattagcacgtggatttgccaatgtttatgctggtgcaattggaacacgcggttccgacggtttaagaattactggcgcaccagaagaaactgaaagtgctaaagaaattattgaatggcttcatggtgaccgcattgcctatactgacagaactagaaaacatgagacaaaagcttcatggtgtaatggaaatatcgggatgactggtcgttcataccttggtactcttcaaattgcaattgctactacaggcgtaaaaggacttaaaactgtagtgtctgaagctgcaatttcttcttggtatgattactaccgcgagcatggtttagtcattgctccagaggcttgccaaggagaagacttagatatgctagctgaaacttgccagtctaatctttgggatgcaggtgactatctaaaaatcaagcctaaatatgatgcaatgcaaaagcgtcttttagaaaaatcagaccgtgaaactggccaatattctgatttctgggaagctagaaattatcgtcatcacactgataatattaaatgttcttggatttcagttcatggtcttaatgattggaatgttaagcctaagaatgtttataaaatttggcaaaaagtttctaaattaccaatcgcacataaactattcttacaccaaggtccgcactacaacatgaataatcttctttccattgacttttctgatttaatgaacctctggttctgtcatgaattgttagacattaaaaataatgcttacaagcaatgggaagatgtaatgattcaagataatctacaaccagatatctggcatgaagaaccaacttggaataatgaattaggtaaaaaagaaatttacttcccagataagagtggcagcctcttaaaagatggcggagaagataatgataaagtttcatttacagaccaaggtggaaaaatctttaaagaagctaaaatttctgaaggaaaatggcagtacgacttcatttctggagaagaaaaatggcttgatcaacaattgcgctttgtaactgatgaattcattcatactgttatagtagttggtcgtcctaagattaaaatgagtgtttctacctctcttcctaaaggccaaatttctgtagctttagttgatctaggtactagaaaacgtctcactccaattcctaagtcatttaatgatcaaattcaagaattgggttatcgcttcggcaccgaggtaatgaaggaattcgttcctgataaagaaactaaggctaaattaattactaaaggtcacatgaatgttcaaaactatgcagatatgaaacatgccgaaaaagttgaacctggtaaattctatgacttagaatttgaactacaacctaccttctatcgcttgccagctggtgcccgattaggtttaattatctactcaaccgaccaagggatgaccaagcgtccactagaagaagaaacttatactattaatttagataagacacaattgatttttcatgagatgtaattagttgatgatactaaggcttaacttctagttaaagaaaggagtgagaccatatggaaacatcaagttcaacaatgtattggatattattttaaataataatattttaaaatttacagtatgcaaaaagcagctagtcttcaaaaaacgaaaactacctgctttttcttattttgctaatttcaaaattactgtaaagataatcatatcatctttatgactaacatgaattttcccatgaaatgtgtgaacaatctcttgtgccattgctaatccaattccaaatcctgattgcttcgaattgtgtgattcatcttctcgatagaagcgctcaaagaaatgcgaataatcttttccttttccttctttataagtattagcaacctttaagatggcatttgttcctagccttcctttagttaaggttacctgcactttcccatctttatcgcaatatttacgtgcattgtctagtaagatgttaatcagttcacttaaaacatttttctctgccttaacatataaatctggcataatcattccactatatttaagattatttttttgcattacagacttaaagctattgacattctttttaacaatttcagaaaaatccactttatttaggaccacttcaccagtttcaccagttcgagctagtgcaattaatcggttaattaaccttgttaatcgatcaacttgttccttggtgcttttattccattcataattattgcctaacatctcttccatttcggtattagcagcaataatggccaaaggagtttttaattcatgaccagcattggtaataaactcacgctgtttacgatatgttgtaataattggaccgatcgcctttttagaaaccaaaatcaataccaaggcaaaaacaatcaaagcaccaattcctaaaacaatcgataccctaactaggagagaaaaacgatgataaatcagcgattcatttaaataaacaataaacttacgaccagtctgatttttcccaacacggtaagcatactgattattaccaattgtcactacgccgtctgttgtcttatccttaaaaattctcttacttgtactaagaatttcagctcgtccaacatcataaacattgtcatcatttactatccgcggattactctgcggagtttcggcaacagtgaagtaacggtattgaaaaactgcctccggattatattcccctgctaagaaatttttattaattggatctttttgattaccaaagactggcttagcattccgcggggttaattgtccttgattgttcaccaaggctgttaaaactcgatccacttcattatgactttgagtatagctaactcctaataaagcacctaaggtgattactagtactataaacaaggctgtaatcgacattccaataaattttcaacgaaacttttggatcattttagctcacctacctaattaaggaaaaactaccacctttttcaccgacaatctgaactgagctttgaatcgactgcaacttttgtcttaagtaagaaatataaatccagactacatcttcactagcttcctcatcatctttccaaacatgtgctagtaaatctgaagttgaaaattcttttccttcattaagcattaagtaattcaaaagctgtgtttctttacttcctaaacgaatcgaattgtgactgactaactcttgttcagcaacatttaaagccaggtctcctacttcaacctcattaggtgtatattgatcgtctcgtcgctcttttgaacgtaaacgtgctagcaactctttcagtgagaatggcttagttaaataatcatcagctccgctatctaaaccagttactcgatcatcaacttctgcttttgcggttaacattaaaacataagtcttatcgccactcttgcgaatttcctttagagcagtaattccatccatgactggcatcataatatctaagataataacgtcatatgaattcttcctagcaagttcaactgcatcccgtccattaaaaacaggatccacctcataattaacactctgcattgcggctaccaaaacacgagataactgttcttcatcttctgcaagcaaaattttcattaagttaatcttcctctctaattaaatggcgcaaagtctgcatacttacatcacaagaagctaattcatcagctactcgctttaactctttaccaatcatttcgggattctttatcttatgcttatacttcatttcatgctctaaactagcccaagtatccatcgctatcgttctaagttgtacttcaacatagtagtgaccaggtgtatttcctacaatatcttcttcaggtctttcaacatctaaaatcatatggtaagaacgatacccatttggtttagcatttgtaatgtaatctttttgcttaactatttctacgtcgtcccattccttaatcaaatcgatacaggtataaatgtcatctataaaattgcaaaccacacggatacctacactatctcgattttcttttagagctgattttgggattaccggcaattcttttcgttgacatttttcaatcatactttctggccgcttaactcggccaatcaagtgttcatataggctatcgccggttttctcttgatgaagtttattttcttttctaaaatactccagcatttgattaagtaaactatctagcactggagtatagccaccataaatatccatattaaaccctctttattaatttactaatattatagcagtcgagatttttttaataactataataatgttaatttaaagaatttttgcttttcattagaaaaactaagaaaaaggcaagattccatattaataagcagatcataactcccaaaatagaatttttaactaaccataaaattaaagctccaagaataaatatagttaagagagttattgcctcaattttttcaaatcgatatgccttcttactataaacttggttcacaatcaaagagaaataataaagtacaatcgtaactacaattaacccatacaaaaacttacggtccacatttttattatttaaatatagggcatctacagtcattaacaatacagaaatcacaattgcaatatgactatacattaagacaaatcctctactaatttgatgatggttaatgatcttatcagataaaagtacatagctagcaaacattaaaactagtgataaaaataaaaatgcagcatacataaggggagtcttactattgaagtaatttgctaaattaacaattgcttctccaaacgcaataatgactatcaaactgactctctccacaaaatgagggaaattaactctttcagccttaaatttttcccataaaaagattggtaaaatcaaaccaataatataagcagcaatacagaaataaatccctacagaataaccaagtatcaaccctaaaattactaaaaagaactctgttcctaaaataaataagaattctcttttatcattaacttcattaaccgaagtgaataaatactgacaaaatattgttgcaaccattacagccatcgcaatattaaaatagtgaaaggttatgcgccattccgtattaatattgttggctaagtaaactgctgtaaacacattaaaaacaagtccggcaatgtctaaaaagttattcttggtgtatcgattaaaataaacaacctgatagagccagatttccattactacaacgacgactaataaaaactctaaaaagtagctaaaggaatacctccattaacaggatgatgaatcatcgccgtaattctagaaatcgcatatacaaaaactaaatcaaagaataattcaaacatatttaccggtttagcaactattttttcacttaaactcctcctcaaacttaattagtttctatcttgccttatattcataaaaaaatcaaaaatgcccttagtcttatccgactaagagcaaattgatagcttaattttctaattctacatatattttcacactctgtgatactgtttgataaacagttgaaacatgtagagtatggtctagaaagtcttgtttttcttcttgagacatagagctttcaaaagaaaccgtaatcaacatttcactaacaactgactttccatggccgagtttagtagtaattgcctgatttgttactttaaagttctttacatctaaatgatgtacatttgcaatcatccctgcagaaattgaaatacaagagttaacagcaccagctaaatattctactggattcggggcaacatttttaccacttgctgattcatcagccatgaatttatttttctttgttcgattttcaatttgccaaggagtatcagttaattcactttttactgtatattttgtcattttttctcttttctaaattaatccatgttttaccaaataatcatgagctactttagcaggtttctcatgcttaacattaacttgataattcatctgctgcatctcttcagtagtaattttaccagccaatttatttaaagcctttacaatttgaggatttctctctgcaaattttgccctcattaggggagctccctgatatggtgggaagaatttcttatcatcatctagcatcactaaattatacttcttaatttctgcatctgttgtatagccatcaacaacattagcttgattattagcaatagcatgatagcgaatgctcgattcagtactcttaattgaagcaaaatctaacttatagattttctttaagcccggatagccatcttttaatgaggtaaagtctggatcaaaggctgcatgtacttttttatttacacggtttaagtcactcatcttggtcaagtgattgtctttagcaaatttttgtgttgtagctaaagcataaccattctggtaagccattggcttcagatattccatatcaaattgtttctttaagtcgcttctagcttctacataaacttgatttggatcattcccggtctttttaccagttttgactaaagtttgtaaaactgtacctgtaaattcaggataaatatcaatcttatcggtttgaagagctttgaataaaaatgtggttccaccaaagttaggttttaaaactaccttagtattggggtcattcttttcgattaggtccttatacatattaatcaaaatagctggttctgatcccatttttccagcaatggtaatcgtttgttttggttcagcaacatttttagaagtattagcataatggttatacaggctacttccaccccaaattactaaagctagggcaattagtgcacttcctacttttagacgtttattattttttgaaataaatttcaaaacgccactaaatattagagcaagcaatgcagataaaattgctcccattaagacttcagtattattgtttgaattaattccaacgtatatataagtccctaagcctccgccaccaattaaagcagctaaagtggcagtaccaataatcataactagagcgatccgaattcctgctactatcattggcatagccatgggaatttctagtcgctgcaactttttccatttagtgagtccaaaggcagtagctgcttcttctagattttcgggtatttccgttaatcccgaataagtattttgaaatattggcataattgcatataaaactaatgcaatgactgctggcacagttccgattccaacaaatgggagcagtaaacctagaaccgccaaactaggaattgtttgaataattcccgctatttgaagtgtaaattcagcagcttttttgtgaccttttaaaataaaagccagcggaattgcaattaccattgcaatcagcaaggcaatcagagaaatcttaatatgaacaagcgtggtagcccaaatttgttcatgttcagttagtaacatctgccatagtgatttaatcatgtccagccacccactttaaaaagaaattccaaactctttttggctcaattaaaaattcaccaaacctggtctctgcaacaaacagagtatcaggatggttagaacaatctttaattaaatcctctacgctatcaacgtgataacgaacaagggtatccactttaggatagaatcgtggatctacgcccaattcactcttcaataaagtttcaaggtcgagcttttgattaattctatttcctgcaaaaaattcctgtacaaattttgtagcaggatgtcttaaaatttctctaggtttgccaacttgctctaaaacacctttatgcaaaattccaattgtgtttcctaaacgaatagcttcttgcatgtcatgtgttacaaacattactgtcttattaaattgttcatgtaaattaataagtaagtcttgtagttgctttcttacaactggatcaagagcagaaaaaggttcatccattaaaacaacttcaggatccgctgctaaagcccgaacaatgccaactcgttgttgttcaccacctgatagttcactcggcctgcgatcacaatataattttggatccaaatcaaccgattttaatagctcttcctgtttttttcgccgttctttgcgatcgacaccttcttgctctaacacaattgtaatattttcaccaacagttaaatttggaaacaaactagctgtttgcaatacataccctgtcttttcccttagtttacgcaaattatattcttttattggtttatcatttagaagaatttgtccctttgttggttcaataagccggttaaacatctttagcaacgttgtcttcccgctcccacttggcccaactaaaacaaaaatatctccttttttcactgcgaaagaaacatcttttaagatttcttgtccatcgtatttttttgaaatatttttatattcaatcatcattttatccttataaaaatagttatttatattttctcactatttataagaacttggcaaaaagattacatctttttaaacaaaaaaataagactgacgaaatagtcagtcttatagttccaaagaagtcttattatttcttctttgagtttttatcttctttttgtaatttttgagccatgttaataatgtactcacgtaaatcatctttaatttgagggtgagataaaccatattcaattgatgtttcaaggtaaccttccttgttaccaacatcgtgacgttcaccattaaatacatgagcgaatactcgttgagtcttgttcatagtatcaattgcgtcagttaattgaatttcgccaccacgaccaggtttttgatgtgctaaaatatcaaaaatttcaggagttaacaagtaacgaccaataattgcgtagtcactaggtgccttatcaacgtctggcttttcaacaaaggccttaacgttaattaaaccaggttcaatttcgctatctggatcaataacaccatacttagaaacttcttcatgtggtacaggcataacagcaatagttgatgcatgagtcttgtcataacgatcaatcaattgcttagttagtggaaccttgtcctccatcaagtcgtcaccaagcataacagcaaatggttcatccccaacgaagctacgagctcttaaaatcgcatcccctaaaccagctgggtgtggttgacgagtgtagtaaaggttaacacctaaattagtaattgattgggttaagtgtaaaagttcagttttacccttttcttccaaatcttgttctagttctgggttagcatcaaagtgatcttcgatagaacgcttgtttttaccagtaacgatcaagatatcttcaattccagattttttagcttcttctacaataaattgaattgttggtttatcaacaatcggtaccatttccttaggcatagccttagtggcaggtaaaaatctagtacctaatccagctgctggaataactgcttttcttactttcattttattctcctcacaaaataagctttccttagtgtattttaccaaacttctagaaacttatttagacaatttactatttttttctaaaaattctcaaaatcgggctacgactgtattcaatttttctaccttttaattcatcccctgtggcattaagacaaatgccaagcaaaagtaaaaatgaacctacatttagccataacataaagattataaaagaacctacaattccatagttttgccagcgcgttccaaattgcctcaaatataaaccaaagaaataggataaggcgctccagctcactacagtaaaccatactccaggccatacgatgcgcttttgtacagtgatgttgggaatgacatagttaatatacaaatttataataaccataaccaaaattataatcggccaacgataattttccaacttatatacccaccacaaggatagattaaaaattggagccaaaaattccataatctgtctaccaaaggtaacaacaaaaattattattgaaaagccaactaccaaaatcacagaaagaacaaaagtaaacgttctagcaagtaaatagttccaccatgacttacctttttcttttttatcaacgccataaattttatttgctgctaagcgaattgaattaaccaaacaacttaaagaccaaatagcaatcacaataccaagagaaataaaaccactggagtgttttttcaataaagcattgataattggcataattagacttgaaacttgagatggaaaaatcaattcaagataacgagcaattggctcagtgtcgatattaagcaaaggtaaaacatttccaataataattatgattggaaaaatacttaatagcacataataagcaataataattgaagtctgatttatctcgccttggctaatatatttagataataactgaaaaaactctgttatacggtttttagtctgattgagaaaagaattcatggtcttactatctattaatcttcatctaaaaagtgaggaagatatttttcatagccatcatatggcttttgcaaagttaagatctttggtccatctggagtaattgcaaaagtatgttcaaattgagctgccttcgaaccatctggagttgcatagtaaacccaatcatcattaggatctgatacagttttttgttcgattctccagtctccaccagcttcaaccattggttcaactgtaatagtcattccttcgcgtaaacgcagaccatgacctgccttaccccagtgaggaacttctggatcttcgtggattgatggttgaataccatggcctacaagttcacgtacatcaccatagccattttcatcttcaacataattttgaataacgctaccaatatcaccaatacgatttccaacaaccgcttgatcaattcccatgtacattgctttcttagtaacgtccattaattttttgtcttcggcagaaatttcaccaacaccataagtagtacatgaatcagtttcatagccatcaacgttgcaagtaacgtcaacgctgactaagtcaccctcttttaggatcttatcttttctaggaatcgcatgagcaatttcatcgtttacactaatacaagttccatacttatatccttcaaaaccttgttctgaaagacgcccaccatgttttttcataaaatcttgagcaaattcttcaatttcccaagttgaaattccaggtttaataacatcacgtaaaccttcaaacatagctgctaaaacgcgaccagatttttgcatcccttgcaactcgcgctttgatttaattgttatcattaaaaagtctccttttttaatttatatactcttagcataccttaaataggtatgattttgtagttattaagaaagtctcaaccattcattataaagcttttcttaaataatttctcttaagatttacaaacctctatacttctttagtataataagagaaaacgttatagaaagaagttttttgcatgaaagcacaaattgtctttgccagcatgactggtaatgatgaagatatggcagaaattttagaagaaaacttacaagatgcaggttttgacgtagaaaatattgacgtcagttttgcagatgctagctcttatcttgatgctgacctttgcgtgatggttacttatacatatggcgaaggcgtgatgactgatgaattaaaagacttttatgaccaactgatcacacttgacctatccggtaaaaaatttgctgtaatgggttcaggagacaagacctataaagatcactattgtgaaaatgtagatgattttgaaaaagcatttattaaatgtggcgctattgaagcagcaaagccagttaagatagaaaatgctgtcgatgatgatgatatcgccttaattgaccaagctactgaagaaatagttgaggcatttaatggctaaaaatcaccctaaaaggaagggacaaaagattactcaagagcagttgagagaactcgggagtaaattggttgcgagacaccgaaatttttatgtttatgttatcttcggttttctagcagccgttattaatattgcctgctttcttttattgcataatatttggaaaatgcctgtgatttatgccaacacaatcgcatttattatttctaatttagcctctttttcttttaataaacatggtgtattcattcaaaatgtcgataaaaagcatggagtagtttaccaaatttgtttattctttatttaccgagtcattagtttagtcccggataacttaattatgctagttggtatttcttggcttcattggaatgcattttttgtaaaaataatcgatcaaattttagtaggtattttcaactatttaactaccaaatcaatttttcttaatactagtggtaaattcgctaaaaaatttaaagactactttaataaaaagtgatctaaaaaagctccataaaaatggagctttttttagttaaaatcaactggtttttgattatgttccttgtcaaaatagtaagcaattgcatccataatccgatcagctgcttttccatccccatatggatttttcgcatttaccatttcagtataagctttttcatcttcaagtaaccgtatcatttcagcacgaaccttctctacttcggttcctacaagctttaaagttccagctgcaactccttcgggacgctcagttgtatcacgtaaaactaatactggcttacctagagaaggagcttcttcttgaactccacccgaatcagtcataataaagtagctttttttagctaaattatgaaaatcaactacatctaggggtttaatcaagtgaattcgcggatcgtcacttaatacctctttagctaccttttgtacacgtggagacagatgaaccggatagataatttcaacgtctttatgactatcaactacctgtttcataactttaaagacgcgtcgcatcggttctccttgattctctctgcggtgcatggtaactaaaataatcttactatctgggttaatttcatccagaacatcgtgatgataatcttctttaaccgtctgttccaaagcatcaatggcagtattcccagtcacataaatattatcagcgggatggttttctttaattaagttttgtttgcttaatttagttggtgcaaaatataaatcagttaaatcatcagtcatttgccgattcatctcttctggaaacggagaatacttattccaggttctaaggccagcctccacatggcctaactttgtttgttcataaaaagttgctaaggcagccgcaaagctagttgttgtatccccatgaaccaaaacaatgtctggttgctctttttttattactttagccatatcaagcattacttttgaagtaatatcttctaatgtttgatttttatgcatgatattaaaatcatagtcaggtttaattttaaaaatatctaaaacctgatccaacatttcacgatgttgagcacttacgactgttatctcttcaaaacgatcatctttttttagcttcaacactaagggtgccattttaatagcttctggtctagtcccaaaaactgtcattacttttactttattcataatttatccttaccttatattttgtatcttctactataccccaattaaattttctttggtactatttgtcaaactactttatacttatatactataaggaaagtgagcaatttatgtttagttttttatctttagctgcaattttaattaccattatatatagtcttttgcttagttttcctctttgggaactcttacccacaaaaaactaagcatgttttaattggaattattgcaatattactaattatttttctctggattgttttagagatttttattaacccattaaaatatgtttaagatgaataaaaaaggctgtataatttttcctgttgatgaatatctatgatattctatcgacaggatttttttacgtaaaaaaagaggccatagtcctctcttacttaaaatccttcttcgaccaattcaattaagtgtatggagatttaaactatgtcctctttaaatgattatattaaatttactcttgatattgaagataaaaacattattttttctgattattcaaatgaaaatattaacggtaagatttacaaaatatatttagctgagctgatccagcctacttgtccttattgtcgttctactaatcttaagcataacggtcattacgtctctaacgttcgtttcattactgctgatgctagtaagcccgttactatcagattaagaaaacaacgtgttctctgcaatgactgtttaaaaagatctatggctcaatctaatctggttaataaaggctgctatatctctaacacttctaagcgaaaaatactttctgctcttactgaagatcgttcaatgaccagcattgctagagaacataatgtatctgtcaacacggttcaaagagtattagaagtctgctcttctaagttctatgatgcctttgatcatctccctgaacacttagcttttgatgaatttaagggcgtaggcaaaaagcttcactttatttgtctagatggtgatactcacaaagttgttcaaattcttagaactcgtttcaaacctgatattctacgctatttttacaagttcactcctaaagctcgtgcaatggttaaaacagtaactatggatcttaattgttattatcctttagttgctagagaattatttccaaatgctcagatagttattgaccgttttcatatggttcaaatgcttactagatcgtttaatattttcagagttcaaatcatgaagcaatttaataaaagaagccgtgaatataagcttttaaagtccccttggaagctttatctcatgaaatatgacaaacttaataagactactccttattacgactggcattttaaggactgtctaacacaggaacatgttgtcttagatggtttagattgtgaccaaaccttagaaaatacttattgggttatgcaggactttatgactgctattcaggataacgatgaaaagaaagttatccatctacttcattcaaaacaaaatgttggtaaacaaatgcatcaaactctattaacttttaaacgtaattattctggtgtcctaaacggtattacctcaacttattctaatggttgtcttgaaggagttaaccgtaagattaaacaaattgaacgtactgcttatggttatagaaatttcaaacatttattaattagaattagactcgaagaaaatattataaaagaaaaggaatcaaacagctatttcttagctgcttaattccttcttaaaattatccatcaacaggatttgcaaaagagcccttttttctatcttataatcttgaagtcaattcaacatcaggatacttatctttaaaccatctctcagcaaatgcattttcaaataagaacaatggctcaccatcccgatctttaaccaataagttacgggatgatgacattttaggatctaattgatccgggttaatccaacgagccacacggtttcctaatgtatggagctcaacttctgaattgtattcatttttcattctgaaagagaatacttcaaattgtaattgaccaactgcccccaaaatataatcatcagttgaatagccacgataaagttgaatcgcaccttcctgaactaattgattcatccctttatggaatgatttttgcttcataacatttttagcagttactcgcataaaaatttcaggcgtaaattgtggtaactctggatagacaattttcttctttccagcataaattgagtcaccaatctgaaaattacccgtatcatacaaaccaactatatctccagctactgcatcagaaacttgtacacgttcactagacataaactcagttgcattattcaatcgaacaggcttaccagttcgagctaaagttacatcaattccctttttgaattcgccgcttccaattcttacaaaagcaattcgatcacggtggttaggattcatgtttgcttgaattttaaaaacaaaaccagagaattctggatcatctgcagctaacttttcatcttcattaaccacatgttcttgaggagcaggtgctaaattaacaaaactatccaagaaagtttctaccccaaagttagttaaagccgatccaaagaagactggtgtttgatctcctcttaaaatcttatctttatcaaaagtatttccagcttctttcaacaagtcaatatcatctaaagtcgattggtatagactatcctgtgctaaagcttcatcttcagataatttgccattttcatctaatggtaaatagcgatcatcttcatcttttcgatagagttcaacccgattgtttgcaatgtcgtataagccttttaattgctttcccataccaattggccagttcattgctacaccttcaatgcctagcaaatcttctaattcagcaattaagtctagtggttcacgtccatcccgatctaatttgttcatgaaagtaaagatcggaatacctctcttctttacaactttaaacagctttttagtttgaggttcaatacctttagcagaatcaataaccattactgcagcatcaacagccattaaggtccgataggtatcttcagagaaatcttggtgtccaggagtatctagaatattaattctctttccttggtattcaaattgcattactgaactagtaactgaaataccacgctttttttcaattgccatccagtcactagttgcatagtgaccacttttacgtgctttaactgtacctgcgcttcgaattactccaccaaaaaggagcatttgttcagtaattgtagtcttacccgcatccgggtgagaaataatcgcaaatgtgcgtctttttttcacttcatccgttaactttgtcattaatctttagcttcttccttttcttgtttttctggaattgtgagcagcagtgttaataaacgagaacctttcattcgtctcgtggttaaaaccatcccattatcaagtttaacgctcaacttctctcccttagcgggaattagacctaatttagtaattacatatccagcaacagtatccacattttccattgccaaatcagttccaaattcttcattgaagtcagctaaaggcatttttccataaataacatactctcttggcccaatttttgaaaataatacctcagccttatcaacttcatcgtcaatatcgccgacaatttcttcaattaaatcttcaattgttgcgagtccaacaacgccgccgtactcatcagtcaaaatagcaagctgtctttgggtctcctgcatctcgactaacaattctcctaattcaatagtttcaggtgcaaataaaggcttaaacataacctgatcgtagtctagcttatcaaaaccaactttatgagcttttcgtaagacagttctaatatgaatgacgcctacaatcttatctttatctccatcataaacaggcactcttgaataaggctcttttaagatcttatctaagttttcttgaaaactatcattaatatcgaccatgaaagcatcagttcgaggcaccattacttctcgtgccatcttttcctcaaattcaagaataccttccatcattgaatattcacgatcgctgatttctttttgctcatgtaatttatttaaaattttatttagcttacgttggccatcgatatcttcatcgccacgaaatttagctcttaatttgctaaatatatcccccgcaccgggatcactactcatctttaaattctctctttctattgatgtgttaaggcccattttaatcacaattatcggtaattatatcacatgcaaatatatgataaaataaggaacaagaaatggggtcctatagatgaaaaaacaaaacatctacttagtatttacttttttactattaattccgtatatttgcagtttaaccctagttggtatctgttataatgccttagttagacattctagtgacatttttagaagttttatcggtgccctagttggtacaattattatgtttgcaattaaggccactattcaacgtccacttgatttagtctctgatgaagtaccaaataacttgtttaaacagattttacgtttttatagtattcgtagacgtaaatttctacttatttgtaattgtttagttgactttgccctctgctggcttgccatggacttagtaagaaaattcttctcactatcttttattattggcaattccgttgggatagtcttattgatcatgctaatttcaacatgtattggcgcttatattgaatatgataatctttctattgaccctaaacagaagtaattattttgaactttcttcagaactggtatctagatataaaatctgggccagttcttttgtttctaagtttaatttagctaaaacatatggtttttcactatcgcctaaattttcgtacatagtaatgccatcttttgacaatttatctaaaaaagtaggaataacaaaatttaaaggttggctaaagaaagctaaattactatctggtgtattaatttctgcaatttctgaagcaggtaattcaaatttatttaatcctgcaacaggcatttgtttgtcatcagccaagattccataccaaaacataaagttttctggtccaaataccaccaagcttgctcgttcattttcatacccattgtctttgataaacttttggaatacaggatcattttccatctcttgaatagcagctgtatatgtcttattttcgtcaatttgatttggcataaaaaccttacctataaagttatgtgccgagtatttttctttcttcattttctctccccttaaaaaagcttcgatctaagtcaggacgtaattggttatagcgttcataccaaatttgtacaaactttctagcaaacggtcccttcttttgatcaatccaatctaataattcaaaactagtactacgcaaaatactatcaatctcttcgctataatgccagcgttttttgttcattgcatactcatcggcatctagaagtcttttttctccatctggaaaaactttaatatctagatcatagtcgatatattttaatgcttctcgatctaaaataaatggactagctaaatttgcatagtatgcaacaccatctggcctaagcattgctatcacattaaaccaaagtttacgatgaaaataaacaattgctggttcacgactaatccattttctaccgtcttcttcggtaattaaagtccgatcattaacgccaataataatattttgttctgttttaactaccatagtgtcacgccaatttcggtgtagcgtaccattatgtttataactttgtattgcgatataatcgccttcacgaggcatctccatgatattcgcctcctaactaaatattataccagcaaattaatattcatctatttcttctaaatttactacttcaccacttaaaaaactatcaatctctccactggaaaaaccatgttgaaataagtatcttttaactttctgtcgtctcttaaagtcatcatctcttcgataacgacgccaagctttaattccttgttttttcaaggcctctagttgatcatcttctgtactttctaaatctaactgatcaactacaagttctcctagctcttggttaaaaccatgtgtttgtagtttttttagcgctttttgcttaatttctttatacgacatttttcctacttgatgaccaattgaatgtattaagcgcataccagcttctatccattcttcatcatctacttcataaagagaatcctgaataatatcgttagctacacctttttgttttaatttactactaattgatcttgggccatcttttcctactctaaggttattctggataaataagcgtgcaaaattattatcatcaagataatttaattctattaagttttctatagcactttgactagcttctggactaatcccctgcttatttaaataagttaaaacttcatatacactacgcggctgatagcttaaataagacatagctagctggagcgcatgactatctgcttcagctttttttattttttcaatatcttcaaggcttagttcagttccttttaacagtcttttttcagctaaggttctttcactgacactgaaggcatattcattatcaataaaaatattatagcgtcccttccgcttttgtgtactaatcttagtaataattggcattatcacaccttcttcatttttttatttcttctatattataataaattaaatacttgtatcacttgaaaataacgcttatgcttattgtgacacttttttcatgaatcaatcgaaatgagggccttattttgacaaaatttactaaaaacaaacaagaaaaaaatattatcatcactattaaacgcttgggtattaatggtgaaggtattggatactataaaaagaaaattatttttattcctggtgcgcttccaaatgaggtagttgttgctaagatcgttgatcgccatccacactatctggaaggtgaattagtaagaattaaagaaaaatctcctgacagagttacctttcctaaaggagttgatcctgcagttggtggattagaactcgcacacctttcttatccaaaacaacttgaatttaaacaacacctaattctagaatcgcttagaaaatatcatccaagagactatattaaatataaagttaaaaagacaattcctacaccaaacgcttggaattatcgaaataaagctcaatatcaaattgaatttaataaggggaagagtaaacttggtctctatgctcctaattcccgtcgtcttattgacctgcctgatatgcctactcaaacaaaagagactcaaaaagtagaacgtgaaattaagaaactaatcgataaacttcacatccgaattgccgactttagacgtcataccgatggaattaaaaccattgccgttcgtcaaagcaatgctactggtgaaattcaggtaactttaattacaattggtaaaaaaattaaagatctcaagttacttgctagtcatattatgaaacttccgaatgtagtttctgttttccaaaatgaaactcaatggcaaaatcctcaagtttggggcaataaaactattaaattgttcggaaagtcacatattacagaagaaatactaggtaaaaaatttaagctttcaccacgcgcatttttccagcttaaccctgaacaaactactactctttactcagaagcccttaaatatcttgacttaactcctgatcaaactttgatcgatgcttatgcgggcgttggtactttgggaatcttagctagcgatcaagtaagacaggttattggaattgaatctattcctgaagccgtaatcgatgctcaagaaaactgccgcttaaatcatgtaagaaatgcggaatatattcaaggaaatgtagaaaaattacttccagaactaaaaaatcaaggtgttccaattaatgcattaatcgtcgaccctccacgtacaggattaagcaaaaagttaattaaaactctacttgaagtaaagcctgaaacctttgtttatgtttcttgtaacccagctactcttgcaaaagatttagttcttctaagtgacgcttatgatgttagggtaattcaaccggttgatatgatgccacaaacaccacgttgggaaggcgttaccaaactagttttaagaaaaaataagtaattatattaatttaagcagtcgatgtgactgcttttttgtgcttataaaaaaggttgtagactgcctggtctacaaccttttttcaagtggatgaggtaaatactatctagcgccataacgtcagtatctgggtttgatattatgacttgatcaacatcacttgtttgcatctgtattgaataacgactatttgatcttactaagagaatcttgtctttaaaacactacaatctggagataaaaactatttacaatattattctacctctccacacatcttattataacaactatgtaagcgaatacaagttatttaacttgatattggcggatatcattacgaataccagcaaaataatatctaccagtttcttcatcactgataagttcaacattgttttctggatcttccaaacctgcagaaaagatttcctcatattcggcaacactaagcttgcttcgattatctaataaagctttatctccaaccttatcaagttgtttttcatagccttcaactacatttgcggaataaaattcagccattgcacctgaaccataagaaaatagaccgactaagtctccagcttttaacctaccattttcaagtaaactaagtagactcaagtataacgatccagtgtaaatattacctacatttgcattcaattctttagctgcagtaaagctgtccattaaccgggcatttgtttcttcatccgttccctcaacagctaatctatttgcctttaatcccatcttagtaaaaggtaagtggtagacaatagcggcaaaatcttttgtttcaagattcttttgttctttgtaagcagaaaaagtatgtttgaaaaagtctaagtaaacctgggtagaatactttccatctaccttggctgttttagaatagttagggcgccagaaatcattgatatcctcactataagcactatggccttcatttaattctaaaattcttggattactagaaattaataaactaacacttccagctccttgagtaacttcaccagcagtattaaccccatagcgagcaatatcactgccgataacaatagcagtttgatcaggatgaagtcgtacaaaatcttgggcaatcattaagccagccgttaagccaaaacatgcttccttaacttcaaaagctctcacagtaggatctaaccctaatgccgattttacaaataaagagccagatttagattgatccacactactttcagtaccaaaaatcaaaagtcctacttttgatttatcaatcttatcgatatagcgtagagttgcattaattcccattgaaactgcatcttgagttggatctgcaacgctcatttttttctgtccaatcccaattaaaaatttatttggatcttgattcctagcatgggctaaatccaccatatcaacatacttatttggagtaaaatatccaatttgatcaattccaaccttcatcttatttttgatcctttcttatttcgcttaaaaattcaaaagctgcttcttgagtatattttttactttcctgcaatttttttaaaactattgctttttcaccttcactagcttttaaggttgctactaaatttctcgcctgcaatttcatatgcccagcttgaattcccttagtagaaattgctaaaagagctgaaaagttatttgctaagccagttgtcgcaataacttctgctagttgcttggcagatatattacctaataaactaaagctttgttgaacgtctcgacgagccttaattgagccacctactacaccgattgctaagggaactgttacagtccccactagtctatcttcttcaattttccacttactcaaagatgtataggcaccatttttattagcccaaacagcagttgctgcttcaactccacgataatcattaccagttgcaaccaatacactatcaataccattcataattcctttattattagtcactgcccggtaaatatcagtttgtcctattttactcaataaagctatctttttagcaacttttaatcctcctacactgtcaattgaaagacttactttagcactagtcaattgcgtaggataattagacaaaattgcatacagagtttgttcaatatctggctgcttctctaattcatttcctaaaaattctaaaatagcatttgttttattagctcccatagcttctgctgggtcaaccaaaactctaagaaaaactaaattttctttttgagaagcttcaattttacgaactcctccaccatgcttgactaagctaacgaattttttattagctaagctaattaattgaggaaattcagtagtaaacttagttaaatcaaaattatcagttacctctaaaacaatttgaccatatattccatttcgtctactatcagctactgctccaccattttgattaaaaattttagctgcatggtttgctgctgcaacaaccgatggttcttctacggccattggtacttgataatctttcccgttaactattaacttaggaagcacaccaagaggaagacggacttgaccaattacattttcactaagtttatctagtctttccaaagtttcagactcaatctcacttagtttaattcctttttcagttaaaaagactcttctttcctctggtaaccattgataaaatttctttttagatgattcttctaatttcatatgcgattccttggccaccgccaatacatagagatacaattgctcttcgaccattaattttacgcaaactgtttactgcactcattactaagcgcgtaccggttgcaccaagcggatgtcctaaactaattgctcctccagcgatatttaatttttcttttggaatatttagatcacgggctacagcatatgcttgagctgcaaaggcctcattaatttcaattagatcataatcctcaattgtgctattagtttttgtaagtaattttttaatagcaaaatatggtgcgtatcccatataagcaggatcacagccaatttctgcataggcacccaagtatgctaatggagttaaatttaattcatctaatttttgttgattagataataacaacatacttgcaccatcagttaacggtgaagaattgccagccgtaactcgtccattttccttaaatacaggttttaattgacctagggcttctaaactagaatctggtcgaatggtttcatcatgatcaagaacatgaccatcgagttcaattggtgcatactcttccttaaaccagtcattctcctgagctgcataagccttggcatgagaatcacgtgcaaattcatccatatcttgacgcgtaatatggtatttatcagctacattctcagctgtaattcccatcggctttctcgaataagcatccccaattccatctatcattaagctatcttgatatgctggattttcatcatgctttttacttttatcaagtaaaagtggtgcatttgtcatactttctgccccacctacaattgcaatttgagaatctcctaggagcatttgaccttgagcaaaccgtaatgcctttaaacttgaaccacaaacgtcgtctacgctagtacccactacagattcaggtaaacctgattttaaagctatttgtcgagcgacattttgacctagcccagcacttaatacatttcccaccaaaatgctatctattttatcttgtggaacaatattctttttcaataatcccttaagtgctaacactcctaggtcaacagcacttttatccttataaaatccacgatacttaccaaaaggaattcgattcattcctactatataaacatcctgtaacactcttccacctcttaataaaaattattctattaacatgatagctcacgccatgcatcaaatgtataaagtataatttttttaatcaattctaaaaaaagattgctaaacaatcttagcaatcttttacatatacttactcaaaaaattatttactttctcctgatattgaatcgggtgagtcgcaaatgatttagcatgtttagctccgggaacaacccaaagttctttcggaccatttgctgccttatagttttgatagaccatctgtgttggtacaaaagtatctttagcaccatgaataaacaatattggtcttttatttttagcaacttgttttacgctactagcatcttttaaaaagtaacctgctctaattctagttattccacttaaaacttcaactaaaggaaaacggggaaaagccggaaaatgatataagtcttctgcttcgtgttctatctcatccttaacattagtgtagccacaatcctcaatataagcttttacttgtttaggcatttttagtccacttgacatcattgttgtagcaccacccatacttacaccaaagatagcaatctgactcttatttccattccttttaataactttctcagcccattttttaacatctactttttcacgccaaccatacccaatatagtttccttcactttgtccatgaccacgtgcatccggtaatagaacattgtagcctagtttatgaaacatagcagcataagctcccattgtatctttattattcataaaaccgtgcaggacaataactgtctttttagaattatttactggaatataatttgcatctaaccttaaattatcatctgctgatttcataatccacttttgtttatgcacattttgataccactttttttccttgtatagtgggtcagttttaactagcttagtatcattgttaataaaagatttatgtcctggaacaacagcaacctgatagaaatataggcctacagctaaaaaaataccacaaactgctaaaatagatataatagctatttttatttttttactcttcagcttcattagaagacctcggttctaaaatataatctatactatctctaaaaaatatagaaatcaagagaggataaagatctatgtatttagatgatttcttaattttaatttctgatctccatcctaattttcaatttttttatcaaaataagaaaaatggcgtaattgatccaatcagtaaagtccaaattgacggagatcgatgccttttatatacaggagaaaatgctaaaacaattgctcaaattaaccatttactgggcaaattaaagtctaaccatcttcctatctatgtatgtacgaagaatacaaacgaaaaaaacaaaatttttggtatcaaaataaatttagtaaagggacaggtttatattttataagatagcaaaaaaagatgcagaaacaatctacatctttttttgctcatcctagtttttatctaaatattcatttaaaactctcaaaactccattgtcattattgctaggagccaaatactttgcatgttcttttgcaatagccataccattttccattgcatagctatattttgcaaaatctagcattggaatatcattaccactatcaccaaaagcaattaaatcttcaccagttaatccaaaataagccagtaactttttcaatccagttgccttattaattccatgtttaacagcatcaatagctactggatttgaagcaaaagtagtcacaatattcccatattgctcattaaattttttctcaatctctccagctattttactatcatgatgaaaagtcaattcaataaaggtatcatcaggtaactcttcccaatcactgatctctacactttctttagcgaagtactgcaaaaattccttatcttttgctggtgcttcagttccaatatatgctgtctccctgccataggccattgtcgccatacttccataggtatgatggacaaaattaactaaatcaatggtctgctttttagttaatccttcaacagccacttcttttccttcaacaattagtcgagaaccattggcagtcacgaaatctacgcgatcaataaattcagaaaagtcattttttaaacgagcaaatggacgaccactagctacaataaattgaatattatgtttttctaatttatttaaaacttgagcaaacaaatcatggtcatagcttctttggtcgtttaaaaatgttccatccatatcaaccgcaacagctttaaaaggaatagtcatattcttctccttactaacggtgatttaaggcaccatttaatttcttacgatatataaagtaaataattaaaataattggcacaataaccaataaaactgggtaaaagtaatctggagctagattttgagcagtcacaccaccgatcattggaccagctgccattcctatatcaaggcccaaataaaaagtcgaactagctaacccttgttcttcaattggagctaacatcaaagcggtagactgattcacagagtaaataaccccatatccaatcgaaagcataattgcagctaatcccattaaccagttattgaccataaaagtagcaataattaaaaataaaatcatcgcaactaaacttagccagaaccaaaagccaaagcgaattaaatcaaaatacttttttaaaccaattctaattaataataaggcgatcgcataaattacaaaaaaataacctacagcaattgaaaaatgctgtctttcaacatacactacaatgtcggcttgtgtaataaaatatggaattgcaaaaaaagtagttaataacgctacgggaatagcatctttttgaatgatttttatttttctttttttattattagtaattttaggcttagcatggtttccaacaaattgaatagaaacaatcattaatagtgctgcaagtacagcgagccaaagagctgacttatagccaattattttatacaagttaatagctaaagctggtgcaagagccatggctaaagcattcatcaagccataaaatcccattgcttctccaacatgactccgaggaaccagaaatgctaaccaggtagtcatacaaactgttgcgagcacaaaaccagtaccattaattaacctaaaaattaagagccaatttcctgatggagagaaacaataacctgccaccccaattaaaattaatactcctccaataaaggacaaactatactttgaaaaacggtcagttaaattaccagcgaccggtcttaagaacattgaaactacactcataatccctgttatcacaccggcaaataccgcactagcacctaaactgattgcatagccattaatcaagggtgttacaaacattactgagaacataaaaaagaaagacgcggccataaccagaataacgtctttagtataaattgattgcttctgtttcaattttttactcctatctagcattatcacttttaactttatcatactttgagtttaagcaaaaaagccagttgaataaatcaactggcttattagtttatattacttaattaataccccatgtaacggtctctttcccaatcagaaactgattgagtgtacttagaccattcaaggttcttagaatcaataaagctttgagtcaagtgttcacctaaagcttcttgaattagtgggtcagccttaaaagcttttacagcattatgcaaagtagatggaagtggtttaatgcctcgcttagctctttcttcttcagacatttcaaaaacattagaagtaataggagccattggcttcttagcctctttaataccatttagtccagcagttaaacaagctgcaaggagaagatatggattagcagttggatcagctgaacgcatttctagacgagtgttaatttcttcagcatctggaatacgaacaagtggtgaacggttcttagaagcccaggaaatataaacaggagcctcaaaaccaggaattagacgtttatatgagttaacagttggattaccaattgctgtaattgcacgggcatgttccaaaattccatttaagaaatagagagctgtatctgataagtggaattcaccatctttatcatagaatacgtttttaccatctttaaataaagacatattagtgtgcattccgtttccagcttgaccttctacaggcttagccataaatgtagcatacaaaccatgctttcttgctacttcacgaacaaccatcttaaatgtttgaacacggtcagcagtagttaaagcatcatcaaatctaaagtcaatttcttgttgaccatcacctacttcgtggtgagcagcttcaacttcaaaaccaatactttctaaagtttcaacaatatcacgccgacatcttgcaccagcatcgtcagaagtcatatcaaagtatgaagcatgatcaggaacttcagtagtccagttaccatcctcacctaacttaaataaatgaaattctgcttcaaaaccaatatcaaaatcagtaaagcccttttctttcatttctttaagaacacgcttcaagttgtttcttggatcaccttcaaaaggttcaccatttgtcttgtgaactgaacatactaaacgaccgatctttccacccttttcatctccccaaggcaaaactgcccaagtagaaaagtctgggtataaaaccatgtcactttcctctagacgaacaaagccatcaattgaagaaccgtcaaaacgaatatcattagttaaaactttatctaattggctagttggaacttcgacggctttagatgttccgttaatatcggtaaaggctaatcttagaaaacgaacatcgttatctttaacactttttttaatatcttctgcagtaatagttttactcattgtacacacctattctaaagaactatagtccaatattataattggtatagtccttaaaaatctattcactacttgtgcttatgcacattgaatacaatagcagaccaaattggtctcgtcaataaatattaatatttctttagctatattttaaactaattgttataaagaatactaataatacactattataaccataattttttatttgtttaaaaattcatttatttttctaagagccttttcagatactttttcatcttgcaaaggatcaagccaaacaacaggtaattggtgtttgaaatatgtcaattgacgtttagcatactttcgagaagcttgtttcagcttgttcacacattcatctaaagtcttttctccagaaaaatatggaaagaattctttatatccaatagcttgaattacttgatgttcacgagacctattttcataaacgaactttgcttcttgtagtaacccatgctccatcattttatctacgcgcatatttattctctgatagacttcttctcgatcactatttaatccaagaattaaagcatcatatcgcggattaatcttttgttgttgttcactaaacaatttaccggttctactaattactgttaatgctctaagactacgacgactattttgcggcgctattttttctgctgcagctggatctttcgcttgaagaagatcccacaacttattttctccattttcttttaaatattcttcccattgtggatcaacgcttgtttgatactcccctggttcaccaagttgaagctggttgaccaaggcattaatataaaatccggttccccccacaactaatggaatggctccatcagcaacaattttatctactgctttggtaccttcagcaacaaaatctttaacagaatattcttcaaaaattgaacgttgattaattaaatagtgttttactcgttttagttcttcatctgttggcttagcggtaccgatacttacctcttgatagatttgcattgaatcaccagaaataatttctgcattaatttttggagctaaatctaacgctaggtctgtttttccgatcccggttgggccaattagtacaataattttttgcatataaaatcctcttattttcttggtatcaattctaacaaaaatcttctttttcttcagagttaatatagcaaaaggctttattgaattaagaattattgctaaaatttgaggtgataaataatttctagggaggcatttatatggcaaagaaatttggtgccggtgttgtaactggtgttttagcaactgttggtgcacttgcagcaggacttgctacttacaagaaaaaggtagtagaacctgagcaaaaagaagctgatagaatcgaacaaaatagaattaaagccaacagaaagagctactcagctcaccaaggctaaataaaaaaagagagattaatccctgtaaaaaggtgttgatctctcttttaatatttagaggccttagtttgaccatcccatttttcaaaaccgtcttttagccagtataccttttcatagcccttcttttgtaaaaagcgtgctgctcttaccgtcaaggcatttgaatcagaataaagataaactggtaaatctggacgaatttcttgatattgatatttaaacattgtataaggaatattacgtgctcctaaaatatgttcttttttaaaaggtcctttttcacgcacatcaataatttgtgcttttcgctttcccttttcaaattcttcattagttaatgcaccaccgactcttttggattggatccatgtccaaagccaactcaaagcaaaggccaaaataatgatgattaagataatgttgataatcccaaaaatattcattaattacttacccctatataagaatttctatagtactatgataatccattactatcttttgcgctagtttccttttcttcttcaatttcatgttcgtgacttaaaatcaattttgcattcatgtattctttcttagaaactacacctgcatgatataaattatccagttcaattcccattagttctatgtcccacttacgtttaccaacataaacgataatattaaacttttttaatagcttttgaacatcatgtaaatttttcattattaattattaatcactattccctgatgtaaacagaagacaacataaataattattactactgctgcgataactcttaacttgtgatgatattgtctcaaatgggcactaccaaaaattattcctaaaagaaaaccagatattaatccaccgagatgacctaagatatcaatatgacttgcaaataaatcaagcgctaagttaatgatagctaatgctaaagcctgccttcccaaataattaattgccggaattgctcgattggctaaataaagagcaattactacaccaaaaagtccaaataaagctgtagaagcaccggcactaactaccgaatcgctcccatatgcataacttaacagatttccaccaatccctgacaataaataaactgttaagaatcgccagtgacctaaaagtggttccataaattgacccatgtaataaatcattactgcattagatgcgatatgtaaccagccgatatgcaaaaattgcgctgtaaacaaacgccaccattgatgttcaacagtaacaagttgattattcattgccccaagtcgaactagggtattaatattagtcgagccacccattattgtttcgattatgaaaacaacaaagagtacaattaaaatcgcatttgtaacaaaagtgctagaaaatcgattagtattcaacttttgcattatccatcatccccttcatttacttaaaataagattttctattggaatatcatgatcctcaattttccattttgtttgatcaaaagcctgaacggaattaactagactaagagtttgagtaggatatttctttaaaaagcgatcataatatccaccaccaaaaccaagccgactatttttatctaagccataagctaatcctggtacaattattaaatctaaatcattttttacctcagcttttggatcgtgattttctaaaaccccaaacttagttttttctaaagaagtgtttttattataaagtgtaaattccatctttctatttggtaaacaacgtggaatatatactttcttttttattttccataaagtagcaataattggggctgtatcgacttctagagccattgaaatagaaataccaacattctctacttgatgtaataatcggcttttaagtagcttttcttttaagatttcatcttctaattgtttttgctgagtttttccaaattcagtcagttttcttatttgtaaatttcgtaaatcttttttattaattaaattcattaaataaaatattattagatacaaaaaaacaacaggaattgcctgttgctttgattacttagtttcgcggtgaagtgttacctttctttcaactgggcaatacttctttaaagctaaacgttccggatgcttacgcttattcttttcagataagtaacttctatcgccacattcggtgcattcaaggataatatgttctgccatgttttccaccacctacttatttagttaactgttaaactataccatgttttccgtacttttaccagtacttttctatttattaagtttgaagtagtcttcaaccattgcctttgccacttgcaaagtatatgaaccttctttatctgggtccagtcctgggaagaccacagctacagcgatttcaggatcctttgatggggcataaccaacaaaagtagcgttaataacttctggcgcattcggattacctgggttatcttcatcataataaaaagtctgagcagtaccagtcttaccagaaatcgaaggcttaacattctttaatgaatgggctgttccccatgaattagtaccatgaacaacacgatacatcccttgatgaataacatcaagttgatcctgcgtccaaggaatacgcatctgaacctgcggcttagtgttatgaagaattgatactttattaccttgcgaattagtctcaccaactgattgaactaaatatggacgcatacgataaccaccattagcaatagttgaaatatattgtactaattgaattggtgtataagcatcatagtttccgtaagacaagtcaagaacagaacctgtaagcaattgaccagctgagttatatgagcgaccttgaatacctgaaacttctccaggaaggtctacaccagttttttgacccaaaccaaacattgcaaaattacgtctcaatttagtaaatgcatctgaaggcattgagataaaactatgtggagtatatttagcatttacccatcttaaagctaattgcatcatgtaaatgttacttgatacttcaagagctgttggggcatcaagactaccaaatgtaccaactgggtaaacagatttcttaattggagaacctggcaagtaaattggcgtatcgggcattacgttgttagttggtgtaataacaccattcattaatccacccgcaacagttgcccctttgactgcagaccccataacaaaggatttattaattacacctaacgcatcatcagtatctttattagtctttgcattatgatcaatacctgcaatcgctaaaagtgctccagtctttggattcatcgctactgcataggcaccattagaatactgcgtagcacctgcagctttagcagccgcatattgcttcttcagtgcatcttctacttgttgttgatatttagcattcattgtcaaaatcaaactggcaccactttgtcctttatagacagtcttagtttgttcaacaccatctccggacttagtaactacctgtgacttagacttagttcctttcagaagcggctcatacttttcttctaagtaacttgtacctacacggtcatttcgtgagtaaccttgtgttaagtagtactgcaagttatcacttggtaaaccagctttttctgaagaaacggaaccaatgatacttttaatggattttccatttggatagcttctggaccagtcagttccaatacctacacctggcaattcagataggtgctctccaactaatgccatttctctatcagttagacctttatttttaatatagatagtagataaagtgtatgctccagaaatcttattaaaaattaaagcagccgttttttgacgtttagtaaaatggatatcttgcttttcaacacgttttaagacattgttatagatttgacttgaacttaaagcatccccattactgtcataacgttcagatcgaggcagcttagctgtttccttttctgatattttactgttagctaaataataatcataaagctgtctttgggtaggttcttcatcatcaagtgttatatattgacttaagcgattagaaattttatatatttgactagacgtaatgctagaatttttggtataagtaattgcgttattagctttattacctaccaaaactttaccgctgctatcatacatcacaccacgtggtacattatttgatacaatcttttggtcggtttgctgtacttctgcttgaaaacgtccaccgtagaaaagctgtaagtaggccaattgaccaattaagaataaaaataaaactaaaatgacgcccaaaataattttcattcttaggggcgtcgaagtggaatttctattcgaacctttactctgttttaaataattcaaaattctaacctcactaaactagaattgattttagcaaaaaatgcatctaaattctatttttctcccagtgaaaatcgcaataattatatattcttaagaagtagggtatttatcaatgattatcaacaaaattaaaacatattttaaaaataaatatctatattggctttcttttttactgcctacttgtatctttgcaagctattttctatatcgaggccaggaaattttaaccgttgatctaggtcaacaatatattgactttctttctttttataaaaataatctactctctaatcctttaaactttatttttacattcagtaatggtctagggagttcgtttattggaactagtgcctattatttaaatagtccctttaattttctactattacttttttcaaattcatctttaccaatagctattcttttaattattagtctaaaagtcggcgctattggtttaagtagcttcttttattttcagaaatttttcaagggtgataataaaattttcgctttagccgctagtcttgcttttgcactgagcggttttgttgttagctataatttaaatctcatgtggctcgacagtctaattttattacctcttttactagacgcaattgataaattatttgaacaaaagaagcactatttttatcttaccacgatcactttcttactatggttaactaatttttatactggtttcatggtgctattttttggcttactttattttattactgctctaattaatcattctttctcaagcaaaattattttccactatttcactaagagtctcttaggcactaccctaggcgcctttgtattattaccagccttttttgaaatattaaatggaaaaattaactccgacactaccctttcgctaggttttcagtttgcaccatatcaagctcttgataaattagtaattggcgcatttaattttactgagatggaaaaaggactacctaacatttttctaactagtatttttactctattgtgcctcctttactttatcaatcaacatttttccctaaaagaaaaatttacatcagctattttactattatttctattcctatcttttagctttaacccactagttctgttatggcatttaggccaatatcctgtttggtatccagcacgctttagctttatcttttctttctatgcaatctatctgggtgttcaagttctcgcacatacacacaaatttaatcttacgagcaaaatagctagtctgcttttagtaattagcttaagtatctttcttttattaagtatccatcaaaaagaatttttgagccaaactaatattattcttaccatcctttttcttttatgtagtttactcataattttattttttaactataagtggatcccagtaatctttttcggaatagtaggactagaagtaagtattaatctgctagcaagtttagataatatctcttatcaaaaaaattttgattatgctaatttcactagtaatgtttctcaaactacaacctatttacataaatatgactctggcttatatcgcacagaaaagacatttactcgttccgatgatgacccattcagtaataattattatggggttagcaactttaattctatttctgatcgtgcagctattaatttagtagattatcttgggctagaaaacaatgataattcttttaccaataatttcgctacgcccttatccgatagtcttttaggcatcaaatataatattgttcccattaagaataggcgtaatttacctaaaaaagaacaagttgtatttacgagtgctttttatcgaccagatttagttacaaatacagtcgttaaaagttttaaacaattacaaattagaaaaaattcatctgctttaccacttatttttatttcaaatacccatcagaaaattaccttttataataatatgcctgctacaaatcaaaataatctctttagcaacatcctcggtcaaaaacttaatcttttcaatagtttatatctaacaaatccaagtaaactaaaaaacactaagcatagtaagaatatcaatgaatataaaaagattgataaaaataaaactgctaacataacctttaatatttcctcatttgaaaagggagcttattacctcgagcttccctcaaacttaactactaatgtcacttctattattgttaataatcaccaacttaacaatgatgatttaggtatttcaagtaaattactaaatattggatattattcaacaaatactcctattaaaattgttttcaatctaaacactgaaaatatcaatttaaatggtattagagttcttcaatttagagaagatgaatttaacaaaattattcgtaaattcaatcaaaaacagccagtaactcatcaaacaagtcctatttctttaaaaattaattacactgcacaaaaaaatgaaactttaaattctaccattccttattcaaaaaattggctgatttttgacaatggtaaacttctgcaaacccacaaatttgcccaaacatttttaagtgcccctctaaaacaaggtccccatcaacttactttaatctatgtaccagttgctttcttaattggtcttataatttcaattatttcactcacacttttatttattttcaaaccaaaaagggattaacttactagcttttacgtaagttaatcccttttttggataaattatttaaattagttcaatgtcttaacgtcattgatagtaacatcaaaagttccacctggggtgttaatagttactttttcacccttctttttaccaagtaaagcttgagcaattggtgaatcattagaaatttttccattaagcggatcagattcatcagatccaacaatagtataggtttctggatcatcagtacctacttcagtgtaagtaacagttttaccaatagaaacttcattaggatcaacactatctgcatcaacaacttgtgcatacttaagcatttgttcaatttgaacaatacgttgttctacagcactttgttcatcttttgctgcatcatactctgagttttctgataagtcaccgaatgatctagcaaccttaattcgttcaataacttctggacgttttactaattttaagttttttaattccttctgaagtttttctttaccttcagcagtcattggataaactttttctgccatactaaaaattctccttacctatacttatttttctttgcaccaaacagcttatgttttctacctaaaaaagtcaaccatttttactggcctaaactactatttcgtttcaaatgttcgtcatagttttcgttgtagtaaaccttaccagtcttaaggtttgcaacaaagtagagatagttagacttaattgggttcaatacagcactaattgaatctagacttggattgttaaatggtccaggtccatatcctttatgaacatataagttatatggtgattttactttaatatcctttagtgataaagaatgtttatgcttattcaatgcatacattactgaaatatctgactgaagtggcatattagctttaagtctgttaaagaatactccagcaatcatacgcctatctttagttttaacaccttcacgttctactaatgaagctaaagttaaaacttcctgtactgttaagtgcttcttcttaattgaactgtagtatggttgcaaaacttgatcagtcttatcaaccatttgattaactaattcttttaaagaagctccttgataaacatcatattttgctgggaagagatatccttctaaatgatagcgaacacccttactgttcatagaactagttaaaagtttaggatattgcttctccaaactcttcataaagctcttatctttcattagctttaagaaatcttgtcgactatacttggtattcttgctaactgtagtagcaatactatcaattgtttgtgcttcttttattagaacatgaccaacaactggacgaccacctccaccttgcaattggctcacaatctctttgttatgcattgaaggtgataaataaaaattccctgcttgaaaatttgtcgcactatgactctttaaccaaaagttgaaaacggccgcatttctaataatctttttctcttgtaaaatttgagcaatttgactattagttgctcccgcaggaatatgaacactaacaacatcttcatcatgtcgattgactggttgaagtgcgtatcctacgtaacagcctccaatcaagacaactaaaactaaaatcgctcctagtccactaaggatccaacgagtaacctttttagatgcctgttcctctaactcatgatttttctttttgtcttgatttagcaaatgcttttcctccgaaaatcacaaaaatctaagacaattatagcaaagctccccagaaaagaattaacgaactttaatctttagactttctttcagatctgcttcaattttttccattgctgtagctacaacttcatcagttaatgtgtctttttcatttaagaaagttaatgagtaagagattgatttatgacctgattcaatttgacttccggcataaacatcgattactcgaatatcataaagatatttgcccccatttaacttaatttgagcttcaatttgtgcattagttacatcattaggtactaatagagataaatctcgctcaatagctgggaattttggagcagccttagctttcatccctttatgaagcatagaaacaattgtatctaaatcaatttcataaacatatatctcactgccacgtaatgctttgtcaagtgtagtaacagcatgtgctaacattccaattagaccaatatattgatcattaatataaatgccggcagttctagttggatgcattccttgaaccagttcagcacgatactctacatcttcatctttgatgccaattgctctaaataagttagttaattgcccctttacaaaatagaagtcaatcttttggtctaaatgttgccaattggctgctaaagtatgtcctgaataaagagcagctaaatgttcatgttcattaaatgtattattttcatgatcataaactctgccttgttcaaataaagctaattctttttgcttacgggccatattatagcttgcagcatcaaccaatcctgttattaggttttctctcatagttgaacgacttgagtttaatggccattgaacttcaactactggtttaggatctttagtaaatgaaattgctttttctggagaagtcaacgagtaagaaattgcttccatcaatccttgaccttgaacgatatccttaattctacgcatagcagtttcttttgctgagtaaccaccatgagtttcagctaaaagtggttgagtagatttcaagttatcataaccataaattcggccaacttcttctactaaatctgctggaatagaaatatcccatcttctattaggaatggtaactactaactcatcttcagagcctgcaacagtaaaacctaactgatcaaagatcttttccatttcagctctgcttaactcagttcccaataccttattaatataagatacagtggttttaactactgaaggatttctttgagcatcagttgcttttatttcaccttcattaactgtaccatccgcatcattacgcaataacaatgcagccatatccaaggctttttgagtattatcccagttaacacctttttcaaatcgacttgatgcttcagttctgttagcgtgacgcaatgcagattttcttacactagttccatcaaaaacggcagattctaagattacatcagtagtatcgtcttcaacttctgagttcttaccacccatgacaccggccatcataacaggcttttgaccgtcagtaatgatgatatcgtttggatctaattccacttctttatcgttcaataatgtaagcttttcatttttatttgcttttctaacttctagtttaccgtccttaaaagtacgagcatcataagcatgcattggttgaccagttaaaagcattacataattagtaacatcgaccacattattaatcggacgaattcctgcattccaaaggcgtctttgcatccacaatggactttcaccaatttttacattagaaatttttcttaagtaaaacttaggtgctagtttttcatcaacttgtacatctaattcattagtccagtcaggtccatcttccttaagcactactggttcaactttaggtttttcatcaacaattgcaccaacttcataagcggcaccttccattgataaagtatcagcacggtttggagtaatatcaaaatctaaaatatagtcatccatgccaagtgctttgtatacttcttcacctggttttacatctgcatctttagggaaaacaaaaattccatctgcatattttgcaggaactaccttatcttcaaaaccaatttcttgaagtccgcaaatcatgccgtttgatttaattccgcgaattttaccacgcttaattttttcatttccggcaattcttgccccgtgtaaagcaacaataacatcttcaccagctgcaacattaggagcaccacaaacaatctgaattggttcttcttcaccaacatcaacttggcatttgtgtaagtgagttccttcaatatcctcacactctaaaatgtgtccaactactattttttttaatccttctgctgggtgatctacagatgcgatctcaacaccagttctagtaatcttttctcctaaatctttaggatcttcatctaaatcaagaaaatcttttaaccaattatatgaaacaagcattaatcttcctccttacggaattgtgctaagaaacgtacatcattagtatagaaatcacgaatatcagaaatgccgtatttcaaaattgcaaaacgatctaaccctaaaccaaaggcaaaaccaccatagactgttgaatctacaccagcattttctaaaacatttgggtgaaccataccagcaccaagtacttcgatccagccagtatacttacaaattggacaccccttaccatcacaattaaaacaagaaacatccatttcaactgatggttcagtaaatgggaagtaagatggacgaagacgagtcttgcgatcttgaccaaaaacgtgcttggcaatcatttctagagttcccttaaggtctgacatagtaacatttttatcgattactaagccttccatttgctggaattggtgggagtgagttgcatcatcatcatctctacgatataccttacctggaccaaccatctttaatggacctttagaaaaatcatgcttttctaaaactctagcttgatctcctgacgtttgcgttctaagtaagttttcctcatcaatatagaaagttgcttgcatatcacgagcagggtgatcctttggcaagttcatcatttcaaagacatagtgatcagtttcaatttctggaccttgaactacttcataacccattccaataaagtagctttctaaatcatctaaaataatattaataggatgctttgaacctaaatgtccttcacgaccaggcaaagtaacatcaattttttcttcttctaattttttggcaattaaagtttgtaagaagttattttttgcttcatctaactgcttttgaaagagatcacgaacttgatttacttcttgacccaccttaggtctattttctggggcaatatctttcattgagtgaagaatttcagttaattcacccttgcgccccattaactctactctaatcttatcaagcattttctggttttcagcttgcttgatttcattcaatccttcttcttttaacttatttattctatcgaataagtccatctcattttcctttccaacaaaaaaagccccgtcccaaaagggacgaagcttcgcggtaccaccctagtttgaactagcacaaataaagtgcgtgttcacactcttttcgaataacggtgaaataccggaattgattagattctgctcctaagatgaaattcatgcttctaacttaagtttcttccaccagtaaaactctctctaaaaagctatccacactactaatcttaatcatcgcatttaattataatagtatcttaaaactttttacctaactttgcaattacctttaagcccatttatcagcccaattatggacttgctcaaaaacggcttgtaaatcggcacccttttgagtcagagtatagctgataattccactctttttgtctacagtacggttaacaattccgtctttttctagttcttttagtcgttcaactaaaacacgatcagagcatttactaatgcaacgtgctaaatccttaaaacgcattgcattagtatcacacaaagagctaataattaagccgttccattttttaccaataattccaaaagcatcaataaaatgcgaacacagtgaataatcttctggatccggacagtcagtcattttagttttgctttcaatttcttgggacatatgtattcctcctaaaaaatcaaaataattttaaatcatctatattaagattatagtgataacacttactaaaaacaagctgcaagcttatgaaaaatgataaatcataatacccgctgctactgccgcatttaatgattctgcctttccctttatcgggatatagatctttttatccgctgtttcaattacctctttacttgccccatgagcctcgtttccaattacgagcgctaattgaggaactggggcacaattattcaaggacttagcagttttatcaagaatgcttacatagactggaagaccattttccttaaaactactaatagcttctaaaatcggattttggataatttgaatatggaactggctcccctgcatactacgctgaacttttggattatataaatctacactttcttcagataatactacaccatcaaaaccagctgcatcggctgtacgaataattgttccaacatttcctggatcagttaaattatctaaaacaacccattttccatattcaaaactaaatgattttggttgattaattggtagcaccataaagatatcttgactatttttagtactacttaaatgctgagcaattgcatcggtaatctggatgactttattatcttttaatttataagtcgtatctaatttttttaaagcttctgctgttcctaaaacataaagatagttttcatgactctttaaagcttcttcaactaaatgaaaaccttcaattaaataagtttgggtctttttacgatactttttttgttcaagctttctaaggcttttaattgtgggattatttactgagttaatttctatcataaatttctacttccttctaatctaatattttaaattacctcgcccaaaattaacatgttaaaatttaagttagaatacacagaaaagagcgataattatgaagacagttacaatgagagttacaggcttagtacaaggagttggctttagatggacaactcaaatgattgcccaagaattaggaatcaccggtactgttaaaaataatccagatgggtctgtatcaattgtagctcaaggggatgaactccctttagagcattttatcaaaaaaattaaagcatctccttcagttgctgcccatgttgatcatgtagatttaaagataattcccaatacagaaaaatttactcgctttagtgtggtttattgatactttaacaaataactagtaaactttattgcagtaacaataaagtaggaaaggttatagttaatgaaatcaaaaactaaatattttagtctctttgccatgataactgtgctagcacttaccttaacaggatgtgctaacaatggtcatagcatctatcaagcacccactagtgggccatatgcttggatctttagtctatttggcaaaccaattcaaaatatcatgttagcagtcgaacatcaaattggtggctcaaatggagctggctgggcaattattattattacctttgttgttcagctcattgttatgccacttcgactagcttctcagcgtaaaatgactacccaacaagaaaaaacgcaaaagcttcaacctcaaatgagattgatccaagaagcacttaagaagcctgggctaacacaaccacagcaaatgcaaattagccaacttcaaatgcgtgtttataaagaaaataatatgtcaatgatgggcggaatgggctgcttaccattacttattcagcttccaatcatgatgggaatttatcaagctgtagcttactctaaagaattagcagcttcaagtttctttggcatttctcttggacaacgatccattatcttaacaattattgctacgttgctgtatgtagttcagggttatctttcaatggttggaatacctgaagaacaaaagaaagcaatgcaaatgactttaattctaagtccagctatgactttctttattagtatttctgctccaggcgctttagcactttacttcttagtcggtggacttattgctatcttgcaacaattgattactacttttgttattatgccaaaagtaaaaagagatgttgcagctgaattaagcgaacgtccacttaaagtagttgttactcaagaaacaatcgataacattcttaacactacttcttcatcaaactccactcctgaggcaaataaagatcttcatcaagatttacgtgcacgtaatgccggtaaacaaaagcgtccaaatgattctgacaaagattaataaataaaaatagggaatccttaacggattccctattttttatttatctgactcagattttaataatggaaattcaatcatgaacttactgcctgagccaagtgttgaactaacactgatctttccatgataactttcaactagtttctgagcaatagctaagcctagaccatttccacccttttcacgggttctagccttatctacacgataaaaacgattgaaaatcttgtcctgctcatcaggagcaattccttcaccaaaatcttgaactaaaatcttaactttatcttcttcagtagcagcagccactaaaatttcttttcgatcagtagaatatttaatagcattatcaatcaaaatgattaaaatttgctcaagatgattacgataaatcttaactattgtatcaggttttaagtctgcatcatcataagtaatagtaaagtcttgatgaatcattctcatgtcattaacagttcgatttaatacttcattgacatcagtcgttttatcaggatactgcaaatcaacctgctcagccctagttagatctagcatttcttgaatcaaatgtttcattctcttgctttcttgaagagaagcctgaattgattcttccagtacttgaggatcatcttttccccaccgctctaataaatttaagtgtccttcaattacagctacgggagtcctcaattcatgagatacatctcctacaaattgtttttgctgctgcatataggcttgcattctatcaagcatcttattaaaagatatagccagttctcctaattcatcatttctatgaagatcgggtactcgccttttatcagtggggtctttattaatatcgtgagaaatttgagacattttcttaattggttgtacaacgctattaactatcaagtaagacaacccaataaaaactacaatagcaataactgatagactaatcatccagtgtcgaatagatttcaatacttgattttgttgatccatggaattatccacaatcaaatacccagttaaccgatgtgtcctctcagaaaaaatcttctgatataccttcatatggattttcccttgcgtcgttacaacttttaatacatgactttcagttttactaaattgtggcatcccttcatcgggaacattcccattactaaaaacaacatctccagcaggattataaatcgtaatactagtatcacgattcgataaagtagctaatacatcatcattaaaaacattaccgccattattagaagtaattggtgtttgtccttctaaaatacgattcgtattaggagaaagctgaggtacaacatttgaaatttgtaaacttgttggaatttcaacgagtcttctttgaaatgtagttgctacactctctgtcaaatttctttcctgtgagataatttgttgcttaactaaagaataaattgcaattgaaaatataacaaaagagaccgtaattgtcgctgcaactaaacttacccacttaaaagttagtgaggactttagggtctctttcttagatttattttgtttcttcacgtgcttcatcattttcatcagttcttaccatataaccggtaccacgaacagtcttgatgtatgatggacggcccggtacatcaatcttattacgtaaataacgcacatagacttcaacaacattcgtttcaatcttagattcaggtccccaaattttgtttaaaagctgctctcttgtaacaacattattcttattttcaattaatgtcattaacaagttgtattcacgtttagttagatcaactgtactatctccgcggtgaacaattcgattagctgtttcaatagttaaatcattgaagtgaactaccttttgaactcccatcgtatcgcccatagctctcttttcaatttgtactcttcttaaaacagcacgtaaacgagctaataattcttcgattgcaaaaggtttaacaatataatcatcagcaccgtggtctaaacctgagacacggtcaattactgaatctcttgcagtcatcataataattggagttgttttttcttggcgaacacgacgagcaatttctaatccattaagatctggcaacattaaatctaataaaattgcgtcaaaatcttcatttaaagctaaatccaatcctttccgaccgtttccttcaacttgagtttcatatttttcatgtcttaattctagttctacaaaacgggcaagatttttttcatcttcaataatcagaattttactcattattttctccactactatttaatctggttaaaaattttattaataaattaatattaaatttaaagatacattaatgcaagggtttattacttgtttttttcatctttaaataaatccttaagcttagcaaaagcaggattttctttattagattgctgttcttgataagcttcttgagaaacaaccttccagccctctccttcaggaaagtctcctttagcttcttcttcaggagtcaagatcactgatggtaagcttaaaagcaagttatcttctacagccttttgaagatcaattgtatcgtctttaacagttacaattgtatcttcttcatcaagctgttcttgagttggttcaacttcactatagttctcagtaaagttgaatttttgatgcatttttactggttttaagctacgagttgaaggtgccacaacatctgcttcgacagtaaagttaccagtaacaaaaggttcatcatagaagaggtcaccggtaacatgaacattctttgcatcttccagtaattctttacttctatcaaaaaactctttacttaactcaacgttctcatcaacatgagttaatggattacgactatttttaatttgcgaatatgaaaactttaacattattttacctcgattggtttacgaccaaaattttgatcttcacctataatttgttcaaaaagccgatccacttttacttgtaaacctaaagttccacttgcagcatttttcttatcaacttttgaaataatcggcacttgaacatcttttctaattttcttaagataatttcttcctcgactactgtaacctaacagtagggttgaaacatcttgataagaatcctttatttcgttctcagtgacatttaaaagcgtgtaaagacataatcttcttaaacgagcataagtatatcgcttagacttaatttgccgcaaaaatgaagtaaaatcttctgcagtatgaatttcttccttcattttgtattctagtccttcactcatttgataaattgactgcaattcttctaaacttgcactttcaattcgatacttcaaaaagctaaataaaagattccagttcggataaactttttgactttctaaacttactaattctcctttaggaagatatttttttaattcagataagtcattgggatgatgcaaacaataatttctaatagccgtagctgaggaaactattttatcttgtaaaagtggatcatcgtgtccacttcctactcttgttataggatgtaaatgaagtggattctttaattgttcacttgcaactgcataagcaacagctaacatcatgttaggttgatttacttcatgccccacttctctagcaaccatttcattatattgagtagcataagtttgagtgtagtctcgaaagtccatccgattcttgggaatttgatttattttttgacccaaataagagaaatttaaattcgcatcctctactccaaaaaataattctgacactcccaaatcactcaacattttaatactaccattagcaaaaatatcagctggctgcacagcaaaagaaaatggtagttcgaataccaaatcggctccagaagctaaagctgcctttgctctttgccacttatccataatcgccatttgtccacgttgaacataattacctgacattacaacaattattggatcatttttagctgctaagcgggcttgattcattaaaaactcatggccactatgaaaaggattatattcggctacaatgccaattacactcatactcttacctttagtctaagtttaattctagtttcttaccattgctccaaagcttttctaagccataaaagtctcgggcatcttcagtaaatacatttacaactacatctcccatatctaccaagagccagttagaatcacgcgttccttcaatacggtagtcttcttttccatgttcatggatcttatcaataatactgttaacgatggcatgaagttgacggtttgagccagctgttgttacaacgtagtaatccgctaaaatactaattccttgcatatcatatgcttcagtatcttcaccatgtctttcatcgattgcttctacagttaaatctaataatttcttactatccaattttatttttcctttcaaaattctaatcctttactgcccatttattgtaagcagcaaatgtcttaggataaatcttttttctattagttattaaaaaatcaagtgtgtgggctaattcaaagcctaccccatcatctaagttagcaaaagctacttttcttgcttcttctacgccaggaaagtcacgacctggttcaataaaatctgctacaaagacaattttatctagcgtggtcatttctacatcagcagtagtatgacgcttaatagcagttaaaatttctggatcagttatctttaattccttttcaataaaatatgatcccacaattccatgccaaatagctcgattataattaagtaaatctggatcaaaatgctgttccttaatcacttcaataaatcgggcaggagagacttgttttgcataatcatggataaatcctgctaaagctgccttatcaggatcataattattaagttcagctaacttacgactagtttcacttacaccaatacaatgcttaaatctcttttcatccatgttgcttttttctttggcaacaatttcatcagaagttaacggggaatatgttttaacaaaattaatttcagtcactatataagcctcttgatttaatatataagcgtacactttccggtactaaataccgaatagaattaccggtagctatattttgacgaattaaggaagatgaaatatctaaattaggtgcatcaacccaaatcattggaaacttgggattttgcggataatttggtctcctaacgccaaccaaagtagataaaagtgctatagtctctggttcgcgccaattttcaaagtcgtttacttcgtcactacccataattaagtaatattgattacgtggggctctcttctttaagtaacgtaaagtatcaaccatgtatgatgttccaccacgcattatttcaaaaagcttaacatgaaagtgtggattatcatgtgtaaccaattcaagcattgcacaccgatctttagtgcttatatttcccgctatttttttatgtggcggcgtattatttgggataaaccatatttcatctaaatgaagcttttttctaacttgctcagccattgataagtgagctaaatgaactgggttaaaagttcctcccataattccaatttgttgggcagaactcgtaaccggttcaaattgtacttgtggtttttcttttacaacacattgcattatattaacgctcttctaattcctaaaccaattccttctggtgtataagcttttactacaacattagcaggtgtggtaataaacccaactccaccaaataaaatatcgcttttttcttttggtgaaaaagtttggccttttaacggtccgagattatcttctttacttggtgggagtaataaatcatctttatgtttttcataaaatacatctgcattttcagtctttgttctgtgtacataaaggtcgcgtgcaacataaattgtaaatccagcagatggaccatctacatagtcaaaacgtcctaatccagctaaaaagattgtctgtccaggcaaaagttggtaggttgctggcttcaatggcttctttggttcaacaacttcaagttcttttccacttaaatgactagccaattgattggcattcaaaattccgggtgtgtcaattaaataatggccattggaaagtggaattttaatttcatctaatgttgtcccagggaatttagaggtagtaatgacatcctttaaatcactgttcatattgataatcgcgttgattaacgtggattttccaacattggttgttccaacaaaatagatatctttcttttcgccttttttagctaaaaatgccatcaactcatctaaatttttctttttagcagctgaaaccaaaaatattttttctggctttaagccatttcgattagcttcttggcgcatccaatctttaattttggattctttagaattttttggaaataaatctactttattaccaactaaaatatattcattgccaccaataaatcgcttaattgaagaaattaaggagttactaaaatcaaataagtcaaccacattaacgactaatgctttcttttgactaattgagttaagtaaagccaagaaatcgtcgttattttcttcgactggcataatttcattatagtgtcttaatctaaaacaccgctgacaatacacctcattatcatcactctctagtgccttttttaaggcagaagatggtaaatagcccgactttttagggtcttgatcttgtaatatacttccacaaccaatacaacgtaattcttcactcattctaatttctccttaaaaactacaggttttcttaaattcaaaaagaaaaagataaattttctcaaagaagcggttgatccttgtattccacttatcagtttcaactaatggttttactaaaactgtagttacaccagctagatttccagcctgtatgtcagtaatcaactggtctcctaccattaaaacttgatccttttttagattcaaggcttttaattccttattaataccgatgggcaaaggcttgcgtgcttttgcaataaaagaaatatggtatggattcagaacttttccaattcgctctgcattattatttgaaataacaactaaacgaattccgtctttagccagccgttgattaagttcatccatttcaacagctgtctctgctttattccaagcaagcaatgtattatccaaatcgctaaacacagctttaattcccatcttctttaactgttttggatctaaatgatagatagtatctattgtataacgaggtctaaataacattaaaaaatctccacttttttctcatatctatagtatcagaaatctttaatctttagaaacatttgatgattgaaaaattaaattttacttttctttgacagaaaagatggtaaaatggtaacaatttatctctctaccgtattacataaaggagttaaattatgaaaaattttatcgatctccatctacatttagatggttctttgccataccctacggttaaaaaattaatgaaaattcacaacttttcaagtttaactgaagcacaactcaaagaaaagctatctgtctctaaaaattgcattgatttacaagagtatctaactaagttcgattttcctctactatttttgcaaactaagaaagatctagaaacagcgatttttgatcttttaaaaaatttgcgttctcaaggactagtctacacagaaattcgatttgctcctcagtttcacactcaaaaaaagctcactcaagaaggagcaattagatcctgcatttcaggactaaaaaaattttatcagtggcaagatgcgcaacaagacaattcctaccctctacatgcaaatttaattctttgtctcatgcgtttaccacatcgggaccaagaaaataatttaactgtcaagttggccgctaaatatagttcccaacatgttgttggacttgacttagctggtccagaaggtccgattcctaataaagcttttagttcattctttgaagacgcaaaagaaatgcatgttccatttacaattcacgcaggagaagcagctggccctgaatcaatgcaagaagcattagatttaggcactaaaagaattgggcatggaattcgctgtttagaaagtgagcaaatggttcaatatttagttgaccataatatcactcttgagtgttgtgccacttctaatctcaacaccaaaatttttaagaaaattgattcctatcctttaaaaactcttctttcaaaaaagataaaagcaacactaaattgcgacaatatgactgtttcaaatactaacttacctaaggaatttaaattacttgaatcaaaaaccggtcttactaaattagacgaacatcaattattattaaattctattaacgctgcttttgcttctgatcaagaaaagaatcgcttattgaccatatttagctaaaattgagaaaaaaatgctccgcctaagcggagcattttttaatattcttagttcaaagctttcttagcagcatctgctaaatcagcaaaagtcttttcatcgttgtaagcaatgtcagctaacatcttacggttcatgtcaataccagctactttcaagccgtgcattaacttagagtatgaaagaccattttgtcttgcagcagcgttgatacgagcaatccataattttctgaattcgctcttacgcttcttacggtcacggaaagcatatttacgagaaacaaatacttgagtacttgctgctttaaattgtaagtgttttgagccacggtaacccttggctaacttcatgatcttcttacgacgagcgcgtgttacggttccacctttagttcttggcatctaaaattcctcctcaaaaagtcttctaataattaacgcatttgggaaagcatctgtttgatgcgctttaagtcacttgctgaaaccatagcagcttttctcaaatgacgacgttgtttcttagtcttaccgtggaaacggtgtccagtgtaagcatggtgacgctttaaaccaccattagcagttctcttgaaacgctttgctgaagcgcggtgtgttttttgctttggcatatctattcctccaattaactactttttctttttatctttctcacttaatggagcaagcattaagaacattgaacggccttccatctttggcttagtaactacattagataagtcactagcttcgtcagccatcttttctaagacctgtttacctaactccttgtgagtaattgcccggcctctaaagcgaatagaaactctaactttagcgcccttggtcaagaatttacgaacatgctttaacttggtgtcaaagtcatttccttcgattgttggacttaaacgaatttctttgacagccataaccttttgattcttacggttttctttggctttcttttgttgttcaaaacggaatttaccgtagtccataattctagcaacaggtggcttagcattaggagaaagcaaaaccaaatcaaggtcagcgtcagctgctttacgtaaagcttcattcttggatacaacaccaacttgttggccatcaacgccaattaaacgaacttcacgagcacgaatatcttcgtttaagatcatatttcttggtatgagtattcacctccacgttaatttcgaggacaagaaaaaagcgggcaaagttaacgcccgcttttaatcaacagatattatcgatcagcccagaggtaatattaacttaggcgagaagcgggagcttcttcttgttctcaacttctaaattataccatctaattaatttacgtcaagaactaattaaatgcaactattctttttagtgccgattaaactctggtgataaattcatcaatcgatcagcattttcttctaacacctctcgccttttaccatacatcatccaaactgtaacagctaatggaactaagaccattagaacttcagagatataatctgtagcccaactattgaattgccagcctgcagaattccaaccactttgcaggtttgcaaggtaatccatcaagaagtgaaaaatcattgggagccaaagtttcccactataaaggtaaagcacggcccataaaaaaccactttccattactccaattacttgagcaattgtagcttcaaaggtttcaccattccaaccaacgtttcctagatgagataatccaaaaagaagcgcagacccatagatagctattggtacacgcaaatttcgatattgattaaagccagcaagcagaattataatagccaaatatctttcagtttcttcaaaaatgcctggttctaaagcagctgtaaagcttgcaatagtaaaatattttttctgcaaatcaattgaatacctaaaaaatgcagtccatatttgcttatcgtaattaataaaggcattgtaaaacacatcaataaatgcaaacaatactagtaataataagactgaatattgaaaatttctgctttttacaaacttcaaattaggattaaagtgaaacccccatgcttttcctaaaaagcaagctaaaattaataaagcaaacgctgcaactacgccttggctagtaattgaatgaagccacggtaaatttttgccaatctttaacaaagaatcaggtccatactgtgttcctaggagaccaactcctattaaacgtaaaaaccaattctttaagctacccgcaaacaaaattgcgaggggtaataataaaactaagtagctcatccatagtaaaagaacccacagaatttccagctgagggacattttttaagaaataattacctatttctacccacacgcttgggaataaagtacttagaccaaataaatttagccatcttacaatttcaaaaattattccattctgtctatttaccctttgattatagaaattaagtccaagaacaattataaaaaaagctccttgaattaaatttcctacactatttttattttggaaaataacctctaaaagcatccagataagtgcaattaataattgcacatcaaaaatttgttgccatcttttatgtgacaaagtaaaatccttcattctattcctccagttagttatctagtttttttattataatgatctctcaatttttttaaagatatttcatgcataataaaaagaactcatctgctgtgagttcttaaaaactaatcaaattttactttagtctaaaattacaacttaaaatttcgttctctatttagatatatcagcaccgtcttcatttatttcttaactctgcttttactctttatttttcttcaattgaatattgatttgtctcacttcattccacaagtgaaaaaagtaaactccatatgcaagagcatacatcagaataaagtttccgataataatggctaactgcttttccataactgttaagccatctacaaagaaattaaatactaaccaagcagttaagcaaacaaaaaaattaatgataatctgctttcttaatgaccaactatcattgttaaaaatccaacccgctaaataaaaaaagattccaattaaaaaagattctaatatccaaaataaaaaatctgagattttaagtgtactattagctaaattgttccaggaagactgcagaagaatctgaacaactatccaagtcatccctattccaattccaattaaaccacttactaataattgaacaacctttttcataatcctaacctctctttcaaaactttaatctttcttcttgcaacttgaatgcgtaagccattttctaaaattgcatcaatatttccgctactaacaatttctaaatgatttatagaatgatagttgacaatcgaacttctggaagtagtaacaaaatcattaggtagaagtttttccacttgatacaatcttcctctaaaaatgtaaacatctctttctgtacaaatcattgttttttcattctcaacttgaatagcaaaaatctgtgaaaactcgatcatataagcatctctatttttgtagccccaaagaaaatcttgctttgatgttaattcattcgtgattcgctttattttgctagtcatccttttcaaccaaaattcaactttttcttctggtagattaggatcaatcttaaactcaactttcattaatttccctccttacttggttattaagtatagttatttaccgcttgaaaaccagagattttcggtaaatggtcttaatctaacggtgaatggtcatttttctatacaaaaaatccgctaggatcttctcttttccctagcggatttttattatctatcaattatcaaaattatttttctcttgagtatgacttaacatctgcatcaatttcagcaataaagtcatctaaactcttagaaatttgttcttcagtaccgtagcgacgaacattaacaccgtttgcgttcatttcttcatcaccaagaactaaagtgtaaggaaccttttgagtttgtgattcacgaatcttgtagccaagtttttcatttctgtggtctacttctgctctaaatccgcgcttagctaattcggcacgaactttatcagcatattcaccgtgagcttcttcattaactggaataatttcagcctgaactggagcaagccaagttgggaatgcacccttgtaaatttcagttaagtaagcgatgaatctttccatagtaccaacaataccacggtgaatcataactggacggtgttcttcaccatcttgaccaacataagttaagccaaatctttctggaagcatgaagtcaagttgaatagttgacatagtttcatcattacctaaagcggtcttagtttgaatatcaagcttaggaccgtagaatgcagcttcaccttcagcttcaacgtagtcaaggccaaggtcatccatagctgctttaagcattgattgagatgtttcccacatttcatcgtttgcgtagtacttatcagtgttctttggatcacggtaagaaagtctgaagtagtaatcagtaatgtcaaagtccttataaacatccatgatcaacttcaaaactttagcaaattcttctctaatttgatcaagtgctacaaaagtgtgtccgtcgttcaaagtcatttcacgtacacgttgcaaacctgacaaagcacctgatttttcgtatctgtgcatcatacctaattcagcaatacgaattggtaattcacggtatgagcgaatgtggtgcttatagatttgaatatgtgatgggcagttcattggacgaagttcaagcatttcgccatcacccatatccattggtgggaacatatcatcacgatagtgtgcccagtgaccagaagtcttgtaagcatctacgttcattaatactggagtataaacgtgttcatagccatcagctacttctttatcaacgatgtatctttcaacaacacgacgaatagtagcaccctttggcatccagtaaggaagacccgcaccaactttaggatcaacaaagaataagtctaagtctctaccaatagttctgtggtctctttctttaatttcagcacgacgctttaagtcttcatctaaagcagccttcttgaagaatgcagtaccaaaaattctttgaagcattgggttagaagatttacctaaccagtatgcaccggcaactgataaaagtttaaagttcttaattttaccagtgtttggtaataaagcatcaaagccaaagtcaacaaagtcacctaacttgtaaaccgcaacttcgtcttcttcatctttcaaaagatccaatttgaattggtcatccttaaagatttcttccaattcactcttcttcattgaagtatattcaatcttttcaccattcttaatggctttttgcattgccttttcaagatctggtaattcagtaaccttaatttgatcttctttatcagtatctacgaagaaaccaccttcgtcagcttcgtgcatccccaaacgtaattctgggtatttgcgctttgcaacagcctcaagtaagaatgctgcagtagcacgtaaaatgtctaagccttcttcatctttatcggtaataatagctgcttctacatcttcatcaacgatgtaatctaaaggtttcattaccccattaatctttgcaccaacagcagcttttcctaaagaagtagcaattgaagatgctaattccttaacagaaactgccttatcaaaatctttcttagagccgtctggcaaagttacagaaaaactcataaatttttacctccaaataaaaaatcccagcactaaaaacagtgctgggacgttaaaatacgtggttccacccgaaattcgaattaattacaaaattaattcctctaaaggtcgttaatggtacctaaccaaatataaaaaatttcaggaatgaaattggggttttcttctaatcaggagcttccagaactaggctcctgtctctgaattgaagaaaatcatgtctttcattgactttcattatactagctcatcaaatagatgcaagcaaaattttaaaattaatttcgacgatttttaccgccaacaaaaacttctttactcaaaaaacgaactcgttccatcaaacgccttgccttaacttcatcaacgctatttctagtttcggcaaaatgttcatttaagccgtccattgttatattcgaactaaaaaatgttggtaaaacattatccatccgcttttgtaaaatcacacctagtatatcgtctcgtgaccactcacttaacgtttccgctccaatatcatcaaaaattaaaaccggagctgaagaaatgcgatcaatctcatcgtttaagctattatcttggaaatggcttcctaaactagcaataaaagaaggtacatgcagaaaaactactctactgccttgccttgctattgaatttgtaagtccagctaaaatatatgttttccctacaccaaaatcacctgttagatacagtccctttatatgcttattttttttaaattcagctaaaaacattgctacttcattcaaggcattctcacgttcaggagttgcatcaacatttgctaattcaacatgacgaagcttagcaggtagatcaatcagttcaattctattttctgcgcgctttttagcttctaaatttagttttgcttcagtagggacataggtaatatcaattacttttccattaagaaaaagtttaggtgtatatccctccatcactggattgggtgactcaatttgttcaacatagttgaaaattgtaggaagggatgcctggacaatttctttattcaatctttctttattctgtgcgagaaaggcttgaacttttggatgctttattgctgttttagcaatttttttgctatcttcacctaatttgcgtttctttataattcgtgtaattacttcagaaatatcttccaccagtacaacacttcctattcatttttaccaaattctcgaaaaattcgatttctttcttcagcagacatcgttgtttttttagactgatttttcttctcatactttgaccagtcagttgtattgcggacagtcttcttctgagtacgataagatagacgtttgcgcttattcttacgttccttaagatatgcaattgcttcagttggtgtagtaattcccttttgaagccaatcattagcaattcgatctgctaaattattagttaagactgcatcatattcaaaacaagtatgaactattagattaattaaaggcggtgttaaacccatctgatcctgcaaacgataaataactttcttttcattagcagttacatatccgccctttttttcttttaactcatataggtaatcagtgggagttttactatctactgctcgaatcaactctgcatctgctgttgacaagttcttaattgttttatcggcatccttaggcttttgctgcaactgttttctaaccatttccttatttcgattaaggccaaagttttcgttaacagcattttgaattgcatacatatttaatttatctgtgcctgccgacatagtaattaaagaagtttccacaaattcttgttctgttaagtgataaaaatcaataatttgcttgatttctacctgatgctttaaaacttcttctttatcaatatgataacttgcaaatagatcgaccaaaaaactccaatcaatcttcacaggctcatttcctagctttatttcacctttattatctttaggaacttcacttgctgcttctttaacttcgataggagcgtcaattgcactctcagcacttagatgaaatacgtcaaaaaatccactagtaacctctttagcatcctttagaccaataaaagtgcgcggcgtgaattttttgaccaagcgattaaaagttacacttcctactcgttcaagtaacaaactagacaacaaaaatgtatgaaaaaactcaccagctgagggaaccttttccacttcaaaaattaacgtttcccctaaaacaggatttgatcctataaaagtcttaatcaaccctgttgcttctaaatgatgtagggtggaaaacagatcttctagttttagatttgtctgatcttgaagttgatacagagttttataatctttggcaaacggaacttcatcaaactccttagtcaaagttatatacaatcctactccttgtatgcctacaaggggttcaaatagagtagttaagactcttatattttcttcactaacagctacttgattagccacataaaaaggctgtttaggatcagcactttcaaacaccggctacctactccttatcatgcttagccatcatatcttccatggcttccataaatcctgaaacatctttaaattgacggtaaatacttgcaaagcgaatataagcaacatcatctaaatttgctagctctttcatcactagattaccaatatctttagatgaaatttcattaagaccttgcttacgaatttcattttctacatggtcaactaaagcatcaagttgttcacttgaaattggtctcttttgtgcggccatcattaccccatgtaaaattttatcgcgattaaatgcttcacgggttccgtcatttttaactactaataaaggtgaacgttctactctttcaaaagttgtaaaacgaaaaccacaattttcacattctctacgtcttctaattgctctattttcatcacttggacgagaatcaattactcttgaagcatttttatgacagtttggacattccatttttttacctgcctatctcttgtaataaatcagataattttttctctaagtcacctattgtaccagtattagctactacataggtagcccttttttctttttcacttaatggcatttgattacttattctagctacagcttcttttttagtgaaggcatttcgtttcattaaacgttcaatctgcaattctggtgtaatagaaatagccaaaacaccattacataaactttcaaagccagattcaaacagcaaaggcacatcgattacaactaatttttcttgatttgcacgatatcttgccatttgttgtttaatttcttggtggacaagtggatgtgttaactcattaagttttttcaacttagctttatcgttaaaaactattccacctaacttacgacgattgatcgtttgatcatcattaagaatatcggtaccaaaataatctactactgctttgtagccattttgcccaatctccattatttgatgagcaatcaagtctgaatcaataattggaatttttttctttttaaaaaattcatcagctgtacttttgccactagcaattccaccagttaaacctaaaaaatatgtcatttgtatagcacctgacaatgcggacagaaagtagttccgcgtccatttactttaattttctctagaatagtgccacaattattacactcttcacccgcatgaccgtaaacctggagcatattttggtaaccacctatatcaccattagcatccaaataagtatgtaccgtagtaccgcgctctttagttgcaacagtaatcgtatgatttatattgtgatataaatctactatcttgtcagcaggaattgacttcgcactacttaagggatgaattttactctgccacaatacttcatcaacataaatatttcctaaaccacaaactacggtttgatctaaaagagtattcttaatattcttcttctttcgacttagagcattaataaagtattctacactaaactcttcagtgtttggttcagggccaaggtgccgaattccggtcgtctgcttctctgttccagtttctactagatgcattcttccgaatttacgtacgtcagcatagcgcagagcagttccatcagtaaaaacaaattccacatgctcgtgctttcctttaggatgatcaggagtcactaaatgatattttccttccattcgtaaatgggaaaccatagtcaggtcatcgctaaatctaaatagtaaatacttgccataacgatcaattttcaaaatttttttattcgttaatttttcaacgaattcgtcaggattattaactataatctttggataccaaataataattttagcaattgtttttcctttaactaaaggagttagcgttcttctaactgtctctacttctggcatttctggcattgtctcacctacttactgtttattttgcatcgtaccaattatgtccccaatttgaatctgcaattagtggaacatctaatttgacagctgactgcataacctctggaacaattttcttaattgtatctaattcatcttttggcacatcaaaaatcaattcatcgtgtacttgtaagaccattttagtctttaaatgtagttcatcaagttttttctgcatattaatcatggcaatcttaataatatcagctgctgatccttgaattggagaattaattgcagttctttccgcaaaacttctgacattgaagttctttgaatgaatatctggtaaataccgtcttctatgcataattgtttctgcatagccattctcacgagcttttttaattgcttcatccatataatttttaatttgaggatattgttcaaagtaattttcaataaaagttttagcctgcttacggctaatgcctaagtttttagacaagccatagtctgaaataccataaacgataccaaaattaacagctttagcatgtctacgcattaatggcgttacttcatcaggtgagtccaagtggaatattttcattgcggtgtgggcgtgaatatcatagcctgacttaaatgcttcttgcatatgttcatccccagaaacatgagctagcactcttagttcaacctgagaataatcacaagagaaaatatacccatcttttgttgaaggaacaaaagcttttctaatctgctttccttcctcagttttagttggaatattttgtaaattaggatcaactgaagaaagacgacctgttgtagtcaaagtctgcaaatagcgagtgtgaattcttccatctggctgaatgcagtcaagcaagcccttaacataagtgttttgaattttagcaatttgacgatagtccaaaatttctgaaacaattggacttttcatttttaattgctctaatacttcaacagatgttgagtaaccagtcttagtcttcttaattggtggtaaacctaatttttcaaataggatatgccccaactgcttaggtgagttcaagttgaattcttcgccagcctgttgataaatcttatgttctagttcttgtaacttaactgcaaaatcattacctaattgattcaaaacggatgcttcaaccttgattccagtaatttccatctttgctaagacgaaagccactggaatttcaattgtttcatataaatcatcttgttcatgatcttttagtttttcaagaagtggagtctttaatttctcaattacggcgactttagctgctaaatgttcaaagaaatcattatcgtcaggtacagcttgttttttaccttttccgtaaacttctaaatcagtctttacagaataatcgtcatataaatgagctatttctccaagatcattcgaattattttcattattaactaaatatgaagcaagaagcatatcatagtctagaccttctgccttgatatctagtcgatgtaaacctacatacgttcttttaatgtcaaaaacattcttcttgatagtcttatcttctagcatttgacgaagtgaattttcttgcaacaaaactggatctttagatacataaatcttattaccaacttttaaagaaaagccttcaattggagctagatgataattatcacctaacattgctaaataaaaagttacttctttttcactgattttatctagctcaatgatattttctttagttaactcaagatattcatacttttccgtttctggtgtgttactagttgtaccattaacatctaactcagctaagaatttcttaaatcctaaacgctcatataaattacgcaagtcttcaatatttggttcttgtaatttagtatcagctagagttacttccactggcgaatcacgatcaatagtagctaatttttttgctaaaaaggccttatctttatcattaattaagttctcttttagcttagactttttcatttcgtctacatgttcataaagttcttcaatagaaccatatttttgaattagacgagaagcagtttttgggccgaccttagttacaccaggataattatctgaactatcccccatcaaagctttcatgtcaatgaattcagttggagtaacaccgttaacttctttcatatgggctggagtataagcttctgtatcgccaactccgtttttagtaattaagactgtggttttatcagatgcaagctgagttagatccctatctccagttacaatatcaactgtatatccagcgtcttctcccatcttagaaagtgtcccaataatatcatcagcttcataattctttagctcataactctttattccaagatctttaagcatttcacgaattacaggaagttgctctgacaattcacttggcgttttttggcgaccacctttataatcttgatacatctcagttctaaaagtaacttttcctgcatcaaaagcaactaatacattagttggattagtctgcttcatgattgcgtcaagcatatttttaaaagtaaaaattgcatttgtatgcaatccatctggactagtaaaacgatcaagctgacggtataaagcataaaaggcacgaaaggccacagagttgccgtcaattaaaagtaatttcttttgtgccatatttttctccttagataaaaaaactgtcaaattagtctcttaactattttaacagtttttcttctatgatttaattatctactttgctttagtttgctctcagattaattctttaccactataaagaaaaaaggaatcacatctctgctataatgtgattcctatgatgaatgcttaagtaaaaaataattattaggggaatatttttacttagattctacttttttcgtgaaaatagttactttttgttgataatcatctatcaacaaatttaaattttgtcgacctttccattgtccatagccaaagatcgacatgcctaaagatcctaaaacaaatagcactattcctataataaacaaccaaagagttttagcgtgaaagtaataaattaatacaacaccaattgcactaatcataaaaaataaattaaaccaagtttttagattttttaacatctttttttggtaattaacttcgttaacatagccttttcttaactcttcaattgtcattataagatctcctccaagattctacttagtatgataaacctgggttgaagaagccaaccaatacacctaagagggcaactccgattaaaataatcatagtccaaatagctgaaacgtgtttcttagccattaaccaccagcataagaaagtaacaataacggtaagcaaaccaggataaatattatccagctgcttttgcaagtccatgaatacacgaccacttgagtcacgtaatttcaatgatgttgtaacacttacccaacttgcaagaacaccaccaactaccattccaccaacaattgaaatagctttacgaattgctttaccttgagtaccaactaaaatatcaaccgctttatcacctagtttatagccacggaagtataagaaacgttgaccaaagtaagcgattaaactccaagctataatatagaaaatcgcaccaactggtgaaccatttcttgacatccctaaagcaatccctaaaagaattggaattaaagtaccatcaattaacgagtcaccaataccagcgataggtcccattaacccagcacgcatgtcattgatagtttcaccgtcaattcccttgccgtttgcacgagcttcttccaaactagcagtcgtaccaataataactgaacctaacatagggttagtgttgaagaaagctgtatatgcatgaatattttcttgttgttgttttttatctggatatagttctttaataattggcaacatagaagctaaatatccaaatgtttgcatttgttcctgtgagaaacaggttaaagcaccccagaaccataagttaaaggatttatttaatgttttgtgactaatctttttctcatccattgttaaatatcctcgtcttcctcatcgtcatcatctacagtcgtatttgcactagtagtaggagcagcttttcctttgctcatttcaatttcgtacataattacggcaaatagtaatgaaattacagtaattgatactaagttcagctttaatgaagcagctaatgtaaaaccaaccaagaatggaataaagtctactgacttattaacaatctgacgaagtaaaatagcaataccaacacatggaagcatagcaccaacagtaaacaaagtcttcattggaatgccatccataggaagggcgttacgtaatgcagtgacaccttgtgcaccaaagtgagtcattaaaacagttggtaagaatgagaagatcaagtgtgaaatccatggccaaccaaagttaactgcgtataatctatctaatttattattttcaatatccttccaacccattgattgccaaaccaagtttaggaatgcaactgagtaaaacagcactgaaccaatagtacccaccaaagtacctaatgacttagccatattagctgcttgactactaaatgggcttaatcctctagaactaatggcaaccattgctaaaggaataccaatataagaaatcgcacgaacatcagctgaaacagtaccacctggagttaccaaagcgatgtaaaccaattgtgttgcaacaccacaagcaattcctaatggaacgtttcccattacgattccgcagattaatcctccgactaacggacgaccaatcatgtagttaccaatagcttgaccagccatacaagagtttgagcacaaacatgctaacagaccaaatatacaggcttgtaaccaacttatagtcattttttctacctctttacctatacttatgacttatattttaataaccaaacttgcctttaaatttgtcccagtaaccaatttgcttatcaggaagaagtgcaaagtgaatcttataacctttatcagccattgcttcaaaggcatctccttcttcttgagtaaatgattggttatctcccaacttaatagcacctggccgatcatttcctggtccaacaatgacttcattcacatcacttggtttaaatccccagtcaactaaaatagttttcatatcaagaggattcttagtaattaaaaagtaacgcgtatttgaagctaaaaccttatcttgaactttcttaaaatgatccattgtccaaacaaagcattttttgccttgaccttcagctgccgacttataagcttcttttaagataggattatcatgggccttatcatttacagcgataattccatcacatggaacttcctttgcccaacgagtagtaattaagccatgaatcatacggtcatcaattctaacaagtgatacagtcatttttatttcctcctaaatatcgtcatcatcgtctgtgttatcttctggtgtaacttcatattgcttcaatgcttgtctagcttcatctaaagcattcttagcaatatcttctttactcatcgtgtctaaagaaaccgttgcagttaaagccatagtaaagttcattccacctagaacaacacctttactcattaatcctctttcagaaaaaacacttaaaaatgttgttagaggacttccaccgattatgtcagctaaaattacaaattcatctttagaactaaagttatgtttctcgaagaaatcattaacttttttcttaaagtcatctgctgattcaccattgtataggcacaatgtatgcactctttcaattgcatccccagcaaacatatctaatgaagttttaagaccttcagcaaatttaccgtgagaaactaaaattagatttttcacttttacaccccttctcttaattacagttataatttatcattatgaaagcttgtacataagtgttaaatgtaatcgtttactgcgtaatgaatatgacatttgtcacatttttactgcttaacttattttttaattttttataaaatatccataacatgatttgttttataaagtagttaataaagggttaattatgaggaaaatatttataataagcagaatcatttttccaatatttgtaattgggataattatctatctcttctatgcacaaccatttagtcataaaccaattaaatttggcagtacttatatgacaatgaataacgatttttatcaaaccttgaatgaaccaattgctaatgaagtagatgatcataacgaccttctctataatcgaaatccagaactaagtgttaataatcaaattacagaaatagaaaattttattaaaaatggggtcaaagttatttttattaatccagtcgatggtaactctccgagactaattagagtattaaaaaaagcccatcaaatgggcattaaaattattgtagttgatagtcaactcaaagattcaaataattatgtagactgtactgttcgatccaataactaccaagctggagtactttgtgcaaaagaattaatggcaagacaaaaaagtgcaaatattttagttttacagcaaccaactgcaatctctgttgtagaacgaattaagggatttgaggatacaattaaaagtcatccaaattttcagattatagatagaatcaatactactggacaatcggaaaatagttatccaaaagtacagcgctatcttagcgaagaaaaaaaatttgatacgattatgtccttaaatgacaaaactgcagttggagctttagcagctattaattcaatcaattcaaataaagaaattgctatctataccattgatggttcagaaaatattaaaaaaatgattagtaataaaaatcctaatattaaagctactgtggctcaatcaccactccaaattggtaaggttgctgttaatgtagcttacaaacttcttaatcatcaaaaagtaaaaaaagaaattattctacctgttcaacttatcacatctaaaaatataaaagattttaatattacggggtggcaataatgaaatttaaatacttagtaactatgcgtcacttcgtgatagctttaaattttattattgtttcttttattggcgcacaatttttactagttacccaatatatccttaatcatcaactaagttcagaactcttaactacgttagctcaagttcccgattcgccccttaccctatttagtgaatgtatcatttcctatggtttattagtgctagtaatgtatatccactatcattataatttttctactcaaaacaccctattactacttgttcttgaatttatattagctttcgtaatcttttttgcagttagaatgaattataatgggatctttttattaattttcattgacctattattaacttatcgaaacttaccaactattcaaagctattggttttggggaatctcaggaactatcttcttactgttattttcattttcaaattattctcttttgggtgttttctttaagatgcctagtctgaacacatatcttgattttcttcctactcaatctcgctcgcttctagttttcttcaataattttcttgtctcattaaacctaattacttttatctccatctgcctcggctacgtaatttatattttaaatcggactcacaccgttcaatcaaaattacatagtatgcaaaaagctaatgatgagcttaaaagttatgcagcaatatcggaaaaaattgctcaagatcatgaaagaaaaagaatcgctagggatattcacgatacagttggccacactttgactggtgtagcagccggaattgatgctgtaatggttttaattgatattaatccagaagctgctaaaacccaacttcaaaaaatatccactgcagttaaacaaggtataaaagaagtgagacaagttttaaatcaaatgcgtcctgatgccttaaaaagttatactttagaatctgcattaagtaagatgttgaaggaatacagcgatatttctcatataaagattgagctcaattatggatggggaaatgcgaactttcaaaaaactactgaaaacattatttttcgtgtcatcgaagaaacagttactaattccctgcgtcatggccatgcaacaaaaatttggattaaatgtaccagtaataactcttcttatattctctccatgcataataatggtaaaagtgagacacacatcaaaccaggttatggcattacacaaatgagagaacgactcacaattatcaacggcacagttgagtttgatggtaaaaaaggttttactacagttgtaaaatttcctaaggtaggtgtttaaaatgataaaaatactaattgccgatgatcaacaattaattagagattcaataaaaataattctagaaagcaatgatgatttttctgtaaccgacacagttgctaacggtaaagaggccttaaatagtattgaaaaaaataaaccagacgttattttaatggacgttagaatgcctgtaatggatggaacagtttgtacaaaatacgttaaagaaaaatatcctgatattaaagtgataattctaacaacatttgatgatgatgattttatttttagtgctttaaaatatggtgcttcgggatatttattaaaaggtggttctcctgctgatttatttacagcaattcgcacagttgcacaaggcggagcaatgatcaatcctgatattacagaaaaagtatttagactgttttcaaaaatggcgcaagcaaattacacaatctcagtaaatgaccaggaaactaaggacttttccaaaagtgaatggtgcgtaattcaacaagttggcctaggtttatccaataaagaaatttctactaaactctttctatctgagggcacagttagaaattatatttctaagattttagagaaattaaatttacgtgacagaactcaattagcaatttgggccgttcaaacaggtgttactagtgaaaatatcgataaaaaatagcaaaataattgtctgcactataatttttatcactttattattggacgtatttctcttctttaaagttaaatacagtagaccagtattaaccattggggtttacacagatagtagctggaatgtacctaatggggatgcggactgtgtaactaaattagcaattaagaaatttaaaaagaaatatcctaatgtgaatattcaatatactgctggaattagaaaaaatgactataataattggttaaccgaaaaaattgttaaaggtaatacgccagacgtaatcatgttaccagaagatattttcaatttattagcaaataatggtgctttaaaatcattaaataatccattaaacgacgacaggatttctcattcaactttttatagtagcgtgttcaaagcaggccagtatcataatgttcaatatggtcttccatacgaaaccaatcccaccttaatgattgctaacaatgatttattaggtaaaaatggtttttctaacttgaattggcacttctctcctaataaattaaaaaatatttgtcggacaattaatataaataataattatgctggtattacctcagattacacttggcaagatgcacagctggcttacggtaattccgtttttgaaaattcatctattaatcttacttcaaataaagcgcgtgcaggtttctcattaatcgaagatttaactaataaaaatggttatcaatatgtcagttcaaatcaatttgatgaaggaaaagtgggttttatgccactatctttagctaagtatcgtacctatacttcctatccctatcatgttgcccatacatctaattttaaatggaaagtatttcaaatgccagctattaagaaggttaaggcaactcctgcatcaaccgtttgtttgggaatttcttccaaaacagcacaccctactctttcctggaagtttattaaacttatgtgcactgacaaagaaatacaacaagaagtattaagaagcagaatgggagcttccgtcttaccacaggttattaagagtcgttatactaaaaaaatttttaaaggagaacagcaaaatcagcttactcctaatatgcttgattcaattctaaaagatgttgcaactacaccaaaatttagaaattatcgtcataaagaagatgaattaaattatctcattcaaaatgcactaaaaaataatcaattgaatcttcaattatttagcattcagcatcaaatcaacaaaaatacttattaataaaaggcggagatgattttccctgcctttttattatttaaattgacaaagcgttttcatagatctactatatatttgcaatatgtaattacatatttgaaagaaggattaaaatgaaatacactattgatgattttgcccgcttaattgaccatactaatttacacgctgatgcttctaatgaagatatgaagaaactatgtgatgaagcgaagaaataccacttcaaaatggtggctatcaatcaggttcaatctaagttttgttcagaacaacttaagaatactgatattgacaccggagcagcaattgcttttccattaggccaacaaaccattgaatcaaaagtttttgatactgaagatgccattaaaaatggtgctaatgaaattgactatgtaattaatattactgaattaaaaaataagaattatgcttatattaaagaagaaatgaagcaaatggttaatatttgtcacaaatatcatgtgccatgtaaagtgatttttgaaaattgttacctaaccaaggaagaaatcaaaaaattagcagaaattgcgaaagaaattaaacctgactttattaaaacttctacaggcttcggcccatctggagcaaaggttgaagatgtaaaattaatgaagtcaatcgttggagacaacgtaaaggtcaaagcagctggtggcattagaaatagtgatgatttcttagcaatggtaagagccggtgcagaccgtattggctgtagtgctggtgttaaaataattgaagctcttaaacagcggatgcaagatgacaacgtaactacaattgagattaatagataaatgactgaagcaaaatataaaaaaattgaagctattttaaaacaaagaattatcgatcaaacctatcctcttaatagtttattgccaaaagaaattgaactagctgccgaattcaacacaagtcgcccaacaattaaccatgcgattcacaatcttgttcaacaaggattcttagagcaacgtaaacgattaggtactattgttaaaagaaataagattgcacaagaatttactcacgtaatccaaagctataatcaagaaatgaatgataaaggattaaaagcaagaactaaagtgatctcttttgataaaattaatcctacttcagaaatacaaaacgccttaaacttatatccttctgactcagtctttaaattagttagactaaggtatgtagatactactccaattgttaaagtgaccacttatatccctgctaagcttgttccagagctagataaaatagatttttcccaagtatccttatacgatgaacttaggaaaagaaatttaccggtcacccatgtcacaagaaaattagaagtgaaacaagcttcttcaactatatcgaaaactttaaaaattaaagaaaatgatcctgttttttattttcatagttatggatatgcaaaaagggatcaaaaaatagaatactcaattgccacttatcgtggagatttgaactcgtttattattgatcttaatcttaactaaaaaggattgattaaatcttttactttactgcaaaagtctaatcaatccttttatcatatttcaaaatatttaattaaagtaacttttcataagcatcttcatacttaggaatatcaccagcacccataaatacaacaactgcattcttgtgcttagttaaatcagcgatgttgtctaaatcaattacttctgaaccaggaatattatttactaaatcttcacttgaaatatctccacttgcttcacgagcagatgcatagataggagtaacatatgctttatcaacatcacgcaaaatttcttcaaagtccttttggtatttcttagttcttgagaaagtatgtggttggaaaactaccactaattctttatctgggaatttttgacgagcagcttgaatagttgcgcgcatttctgttgggtggtgagcataatcatcaattacggaaacatccccaaaatctttttcggcaaaacgtctttttgcacccttgaaagtaagcagaccttccttaatatcatccattggaaccttttcagtataagcaactgcaattacagcagtagtgtttaaaatactgtgatcaccaaataagtgaatttcaaaacggccaaggtcttttccatgtgctaaaacattaaatttagagccagtagttgtcttttcgatattaactgcttgaaaatcatcagtatccttgaagccataagtatacttaggaatatcagtctttaaactttgcaaacgcttgtcatctccccaaacaaagagagccttcttagtttgatcagctgcagtttgaaaagcactagtgtaatcatcttgatccttaaagtaatcagggtgatcaaagtcaatgttagtcataatttggtaatctggatgatatgccaagaagtgacgacggtattcatcagcttcataaacaaagaaacgtgagccctctactcctttaccgcgaccatcaccaatcaagtaagaagttggtgcaacttcacctaaaacgtgtgccaaaagactagtagttgaagtcttaccgtgagtaccggatacaccaattgaagtatgcatctgtacaatttcttcaactgtatcaggatagctttgccattcaacatttttgtctaaacatgctgctacttcaggattatcttgtttaaaagcattccctttaacaattacttgttctgcattgctcttaatattggccggatcaaaattttttacttcaataccagctttttcaagaggtacctgagtaaacgtatatttttcaatatctgaacctgcaacgttataacctaggtcatgtaaaactagagctagggatgccataccagttcctttaataccaatgaaccaaatttgtttatttttgtctaacatattattaatatctccatagtttatgccaaaatattcgctttaattctaccatttttagcacaaaaaaagaacataacccagcgttatgttctaattagaaagtagttagctcatccttactccctactttctttaatatttattaatctgtaataaactatttatcgaaccctaaaatattacgtcgtcttagatcatcaatccacgccatcagcattcttatgtaggtgataacccaaaatggtaatcatcaaaaaaactccgcatatcttttatacttggccgataagtgaggctatacccccccccagaatttctggaggattggctagtattttgtacatattgcacttcatcattactatcttgctccattattttattcaccatatatatcaaataaaaaaacattattcttacagttttactatatcacttatgatgattaaataacataataaagatagatattaactataattctagatttatttacaggataaagcaacaacaattatgctatatggctatgaataaaaagttttaaattacatattcataagttaattctaaattataatgataattattcttataacaaaacccgaaattcaaatgaatttcgggttttaaaaacttcgttaattagtaatatattttaaagactaatttgaccactagctaataattcatcacacttagttggttcaaattcatcgccagctttaaagtcgtcaggaacaaccataataccacgcttttgaggagcatgtgctaagcctaattcgcgtgctgaacaaatcataccgtatgaatcaacaccacgaagtgcacctggccaaatttgttgaccatttggcattaaagtaccaggaagtgccacaactaccatttggccctgagcaatatttggagcaccacaaacgatttgatgctcttcaccattacccacatcaacagtagttacatgtaagtgatctgaatctggatgtgcttcacaagtcttaacgtaaccataaacaagagttggctttccaatttctagcttagtatcgaagccagctgcagcaattttcttgtttaaagcatcgactaattcttgtgttggtttaacttcaccatttggtaacttatcgtagtctaaaaagctacttacgttaaagaaattaaatccaataacttctccatcttcattttcaactcttgtaacttgatctttctctgtgaacttactacgacctttatcttggtccaaaatcacaattaaagtatcagggtaacttgttttattggtagaaataatcatttctagtaaatttcctttcctagactatttgagagagttaaggaagttttctacttcttctttagtctttctgtccttatttactagtctaccaatttctttgccatcttggtagacaacaaagctaggaattccaaagatatttaattctttggctacatcaattgatccatcacggtcaatcttatagaattttgcatcaggattatctttttcaatttgtggtaaaaatgggtctaagaagcggcaatctgggcaccatgtagctgaaaatagtaatactacttttccatttttggtaatttcttttaacttctcaggagttaattctttaatttcttccatttatctcaccttttcttactttttataagttacaattattttacatctttttatttcaaaaatctagtgtcagatcttttagcttaaaaacgatctacaataaaaatatagaaagagggtattaaaacaatggttgatatgaataaggaattactccacgccggttatcaattacacttagtttttgacgaaatggttcaagagattagaaaagattctgataattggattatgattattgaaaaaaatattgaccaaatttcttcattaatttctgcctatcataaaattgcagctacaattaccaccaatactcgaaaaaatggactacctgtacacttaaaatctgcttcagatgataccttaaaagtgatggacggatttaatgatgaaattcttacttttgataattttgtcgataatagtgaccatatcaaagcctttaccaaattttttagggccgtcaattatacaaacgaattacttctagaattaaaattgcaaaacaaataattagactaaaaaagtgcctaggattaaattttcctaagcacttttttgtcttttcaaaatatttttagcaatttattttacaaaatgtgcatgcaagcagtaaattggattacccttagctgcaaatttatgttcatattcagtctcaacatttctttcaaaaatttcatcatctgcatgatgtaaatctagactcacataatcaaatttcattccataattgttaagactaactaaactgtattcaaacaatcctcgattatctgtcttaaattctaaatgtccctctggctttaaaatttgacgatacttatccaaaaagctcttataagttaatctacgcttttcatgacgtgtctttggccaaggatcagaaaagtttaaataaacaatgtctacgctgttttctggtaaatacattgcaatattagcagcgtctgcacacattaattgcaagttatcgatcttttcttcaagcttagttcttaaaatcatcccagcagctgttgtttgaagttctactccaataaaattcatctcaggatgttctttagctaaagtagtaataaattggccctttcctgagccaatttcaattgctaatggcttagaaaagtcctcgaatctttcttcccagttaattttcttatctggatctggctcatttaaaattacttctggatgttcagctactaatttttgagcccaaggtttatttcttaatctcattttttcacaacctaatatctaacttttttaaataactgttcaattttacttggtaaataaaaatatagcaataagaatgttaaggcaagtaaagcaataattccaccaaatgcttctaatttttgcggagaaaagattattattgctaaactaattaatccccattcaagtaacattcccttttgaagaacttttcgtagagcttgtcctctagaagcaaacggaattggcattacatgatacatcatattatgctcatatactgttcctaaaggaatcaattgataaagggttaagaaaatgatcaaagcaccggtgccaattgcccaacctgcgtcttgtaagcatgcaattaataaaattgcaaacagaatcattctaattaataaattgctatattccggatctcgcaataatactctttggtaaatgaaagtatttggcgtttgatcagttgttttgattaagaagtctaaatattttcttctagaaattcgtactttcttatcaggtacatcagtaaacatactatagaaattatttagtaaatctactcttcgttcttcataatctaatgccttataccagtcaaacatctttccttgtggcaaatagtctactccaatccaagcagcaattgctatcgtagtataaataattggattaggataatggcctaaaaaagaaagatacaagactagaaagttaattcctaggtatagccaagtattgtaataattatatttattaaaatagaaacttctaacaatcaatttaaattgtacattcttactggcgaccaaaccaatcacaataaaaatcaggccaccaattgaaaagccagctctcattgtcgcaaaaggcaataaaattcctgacaccaaaacaattaaaacgaccggtaaaatcatattatgcagatataaaggcttaaaatataccttcatttcattatcttgattaaaaagaaaatgttcatcagccctatcaaacaaagtcgcaaaatgaccaattcccaaagttgcagtccaaattaaggctaaaaggggcttataaaaccaaagattatttggccattttttaatgttttgcgcataccaaaacattaaagctccaaatagaaaaatcaaagccaaaataaaaaagtcgttaaaaactaaagtcagataatgcatctgttttttgaagtttttattgagtctatttttaattaaatcagtcatgtttcttcaccgtttcctgatttaaaatttgatataaacgatcaaaggaatcgcttggctttaatccataaaactgtctaatttcatttaaactaccttcagtttcaatcgtgccattatttaagacagcaaatgtttgaacagcttcttgtgcttcagccaaaacatgagttgtcattaaaaccatcttttgatcagcaacagcttctttaactaaatcaataaaattagctaccgctaagggatcaagaccagtaaatggttcatctattaccaacaagtctgcatttgctaaaaagctagttacaatcattaccttttgcttcatccctttagaaaagttaattggaagccaatccagcttattttctaaacgaaacattttgcataattcttttgctcgtgcccaagcttgatcatgatccaaatcataggtaagcattactaactctaaatgctctttcaaagttaattctggatataaaattggggtttctggaatataagcgaccatctttttaaattcagcaggattttcggttaagcttacaccattcaaaatgatcttgcccttttgcattcttaataatccaagtaagtgcttaattgttgttgatttaccagcaccatttagtccaattaaacctacagcctgtccaggttcaattgttaaatttacatttttaatgacattaatcccagagtatcctccagttaaattttcaattttaagtgccattactttttcctctctactgcaataagatacatatttatgatagcatgaacataagttaaactaaattttcttttcattaagaaaggggtcttatcatgacagaattagaaaaggattgtttattttgtaaaatcattagaggagaaattccttcttacacagtttttgaaaacgatgatgtcaaagcttttcttgatatttctcaagtaactaaaggacatactctcattattcctaagaagcacttagttaacttctttgactacagccaagaagatgctgctagatttttacaatatatccctgttattgcccaagcaattaagaagtctgatccaactattaaaggattgaatgttgaggtgaacaatggtgaaatcgctggacaagttgtaatgcattcacatattcatttaattccacgtagaagcgaaaatgatcctgtttctactcctcacgtaaacaatgcagacgaatattcagaagaagattatcaagcggttgcaaacgctatcaaaagtaatctataataccagtaattttgcctttaatgcggtacaataaaggtggttattaagttaaaaattattgaatagataagaggtatacattatgtctggatttttattaggaattcttacaggtactgttgcaggtggcttattgtcatacgctaagaatccattaagtggtaactcaattagaagtgatgttaaggattctgcagataatttcactgattccgttcaccgggttaagacaatttatgatgaactcgaagaaaagagaatggaacaacctgaagaagaaaataagactgaagaaacagatactactgaaactccaagtgaagacgaagatgttgaagtttctgaccgcccttcactcaaagataaggctcatgatttagttgatgccttctctgctgcttcattcaaagctgttgaccatgaccgtgtctttgctgcagttaagaacaaattaaatgaagcaaaagaagatcttgaagatgcaagcgatgatgttaaagatgctactgaagatgaagaaaaagtagatagcaactctggcgcaagcgaagaagaacataaggaagaaaattaatgaagttttttggaatcggattaggtttaggcagcttagcaggattaggaatctcgcttctcccaaatccacaaactggtcataaagttaaagaagatgttcggctctttttagatggcacaaaaaatgatgcttcttcattagttaccagtacgaagcaagctacacaagctgctaatgaattaatgaataatctaccacaagctgaacaaacagttaaagacatacaaaacaacttaactgattttcaaagttccattaagccagaagttgatcaaattaaagaaaatgtttctaatttaactaaagaagcaaaagacacagctgatggaattaaaaatgaactttaattttaagatttgttagtcttttttataaatatcaagaaaactcctattgtccattgggataatgggagtttttatgttatatttgaacttgtaattaagcaaaggatgtgcaaattaatttatgaataaaacatggaaaaaagcagctactgttttagcttttgcaggaattgccttaagtgctactgcttgttctggcggtaaagctgtcgttacttataagggcggtaaaattaccgaatcacaatattacgacaagatgaaagaatctcaagcaggtcaatcaactcttgccagcatgattgtttctgatgccctagaaagtcaatacggcaaagacgttactcaaaagcaagttgataaagaatacaataagtacaagaagcaatatggtagtcaatttgactcagttcttgaacaaaatggaatgaccgcttctacctttaaagataacttaaagactaatcttttaactgaggctgctttgaagcacatcaagaagattactccagctcaagaaaagaaagcttggaagaattatcaaccagaagttactgtacaacacattcttgtttcaaagaagagtacagctgaggatgtcatcaaacaattacaagatggcggcgacttcaagaaactagctaagaagtattctactgatactgctactaagaatgatgctggtaaattacctgcatttgactcaactgattctactttagattctagtttcaagactgccgcatttaaacttaagactggtgaaatcactactactccagttaagactcaatacggctaccacgtaattaaaatgattaagcaccctgccaaaggtactttcaaggaacacaagaaacaaattgataatcaaatctatcaatcaatgtccgaagatcaaaacgttatgagaagcgtaattgctactgttcttaagcgtgcggatgtttctatcaaggataaagacttaaagaacgttctttctcaatacgtttcatcagatagtctttcaaaatagaatttttacataatataaaaaaccaaggttaaaatcatcattaaccttggtttttatttactctaattttgttgctttatctaaggcatcatcatttttaggtctgtaaaatctccgattgtcttgtgacttaatggtttcagtaaattctcctggcttagtttgctgcaaagcattagtaattgcataaactgtagcatctaaatcatcaattttatgtaaaacttcagcttctagcactactggtcgatgagctgcgccatattcaggtaagccgtgatgtgacaaaactaaatgccgcaagagcattaaatcttcactatgctcatcaattttcaattcatgagctgctagcataatctgctcatcaattaaaactaagtgtccaatcaaatttccttcggccgtataagttgtggctacaggaccagatagttcaattacctttcccatatcatgtaaaatgcatcccgcatatagaagtgaccgatcaatttgaggataagtattagcaattccttccgcatcccttagcattgaaacagtatggaatgccagtccgtttctgacggcatgatggttagatttgccagctggatatgagaaaaactctttattccatttcttaagtaagtagcggacaattcgattccaggttggatttaagatctcaaaaacacgtttattaatttcttcttcaagatctttttgtttaattggagctgaatgaacaaattgacttaaatcatatccttcatttggtcccactactcgcaaatcgtaaattcttatttgcggtctatcttgatactcttctcgtcttccactcaattccacgatagttcctggactaaaagtatccgcatcctgctgactagcgttccaaagatttcctctaattgtgccacttgaatcgctaaattgtaaaactaagtattgtttaccatttttactagtacgaagacttgaatcttttagaagtaaaaccaaattcatatcttcgccatcattataatcaagcaacctttttatcattattgttccttttctattcttattggttccatctcaagattagctactaaatcttgtcgtgctgtaaaaattaaaacttgtgtcttcttagtcaactcttctaatagtttgacaatataattggttctttgtgcatcaaagtttacaaaagcatcatcaatcaaaattggcaacgcaattttatctgcaacttgttccacaaaagctaatttcaaagcaaaatataattgctcacttgtcccacgagatagatattcaacattaaattttttaccatcttctcttttaactttaagttttttatctaattggatatcaacatatcttccaccagttaaaagattgaaatatttctttgcatcttcaagcatcttaggaaaacgctcattggaggctaaatctaagcctcgcacaatccaattgctagttaataagttagctaaatattctttaacattttcactcaatgatgtttctagatcagttaatttttgtttttcagcaaaatatttatcagaatttgctaaaacatgcatctgattttcaagcttagcattttctgcatgtaaatcattaatttgctcttgcttttgagagatttgcttttctatttgatccttattttctgttaatttatttggatcttttgcaatttcttctaattgtgcgagatcagcttgcaaatcattttgcagcgcttcaattttcaacttcaattgttcttgtacttccgcttgttgctttaacttagaaaattctgcaaaatcagtaactttacttgccgcaaataaattagaaagatcaattttattcttagctaattggttctttttttcttgtaaatgtactgccacatcatttaaatgttgcttagacaaattattctgatcaattaatttttgtaacgaattcaactgatttataatatctgaaaatgtctgaacatttctttgagtaaaaggatataacccctgaacaaaagcttgaattttttcattcagagaagcttgatcttgatctagttgactaagtgtttgctttttagattcaatttgaactacttcgttccacaaactatttaaatcaatgacattaggatcaagtccatatttttcaataaattcttggtctttttggcttttcttagcattagtttgctttgtccaaacaaatagtccaagcccacctaaggcaatcattattcccaagaaacgcacaaataagttattaattgcaattgcactaaaaagtcctgcaactaataaaattaatgataaaattcctggcaaattattattttcttgcttttgactctttagagcttgataatcatcctttattttgtttcgagtctcacttgataatttgcttaatttaactgcttctggctgaaactgttcataagactttaaatctttcttagtagtttcaatttgccggtgcaaatctttactttcactttcccaatgcaaaacttcagccttatgatcaactaatgcttgaattttatctttgttagataattcgctactgttcttaatttcatcaagctgcgtctctaaatttttaatatcagctgttaaatctgaaatcttactttgaatagcccgtgctttctcataactctctttagaaaaagaaacaggttgtaattctttttttagttgctgatactgcttaaaattagttagcttttgcattaatagactaattttttggtcttctttatttaattcaactagttcagactgaatttttttcagtttttccttttcttgagttaatttttcttcaagttcacgataatcattaagttcattattggtttgagctaaaacctctttttgttcttcaatttgattaattaattgattaactatcggcttgcgtccactctttttaaaaagcttctgagcattacttgaaaactcatctcttaaatcaagtaatttgtgactttgtgatgctcctaaaaagtaaatttgttccattaattctgcctgagataatccatttacctcgcgcagcatatcctgattaaaaataaagctgtcagtataaaaactaccatctatattttggatacgatcaaaaaatacactctctggcacttcttgatcatttaaactaacttttaaaacccccttcttaggatccccttttgcatataaccgacttaaaataaaagttccatctgtatcttcaaaagttaagcttccacccattggactaacatgatccaaaggttgataatcctcaaagaaaggtgatttattagttcttaggtgaaagccaaatagaacttgctttacaaaggctacagttgtactttttccagcttcatttgcacctaaaaatatcgttaaatctttgttcaaattaaaagtcacatcatttaattttccaaagtgaataattttaatttgagttaacttcatcatctatatcctttaatttttgtcccaatttaacctgggctaattcttttacttcgtcaataaattctggtttcttcaaaatatcagcaacataatcactttttttacttaaatcactagctaacgcataaatcttatcaagctcaaaagtttcattttcagcttgatcaaatgcttctttatccgctgttctaagttgaagcttttcattattcgtcagataaacttttacaagtctagaatcaaagttcaaagaattagagagttgaagccagtactcactgtccttaactaattctagttctttttcacttaaatattgggctccttcaattgttaaaccaaataaagtttttcgtacatttttcttagtcaaagtttcaactatttgtcttgttagatctttttgtgaaatttcttgatccaaagttagggttgccatttgccaaataattggtgctgtctcaataaaatctagacttacttttttagttgtttcatctactataccaatatatacacctttactaccttgttcgttaatgtgtctaccctggagattaccactataaacaattaaggggtcttcacttaaagtctgacgtaaatgaatatgacctaaggcaaagtaattataatttaaatctttaatttcagccgttgtaaatggagcataaacattttgataatttgtagtagtttttgcacccgcatgcattaaaccaatagtaaagttatctccttttttaggaaattcactaatcttatcagtttcgatgtgattatgctgataagaaaatccaactactgtatatcgaaaatcctctttagttttagattcaaattcttctacttcttcattagagcctaaaagtttgaagtatgatgtttgtggcaataacatctcattaggattcaaataatcatgatttcctagaatcatcacaacttgaattttttgatctgtaagtcgctttatttcacgactaaaaaataattgactctgaggactagggtgagctgaatcaaatgtatcaccagcaattaatactaaatctacatttctatctagtgctgtatcaattgctttagtgaatgacttttgggtagattgtttaatatttttaaattcattagatggcaaaaaagatagtccttgaaagggactatctaagtgcgcatctgctaaatgcataaattccatactaattattttgcctttaaatcatcgtacaaatcgccaattggcttagtcatagcttgttgaacgtcgttgatcatttggaagagagcttgttccttggtaatcatgtcttttaattcgtcattattacgaacttcttcattgatcttttgatattctttttgtgcttcttcagaaagtggttgacctgaattttgagcagctaaaatttgttgttgaagcttatccattctttggtataagtctaaactttctggattattctttaaattttcaagagatttcttcaaatctttgaattgttctgtttcttgtaagtcctttgctaattgattagcgttatcgtaaatattaaccatttaaataaaaactccttttttaacgacctaaaagtcctttaagattattataccattcgttgaacttagacccagtatcattgattcctttttgtacttgttgacctaaattaccaagccagtctgaatttgcacctgtatcttttgctatctgttgggcactcttttccttaaattgtgtctgagaagtatatggaagtagccgttctaattcagatttatacaagtgagtaattccagtttctgaaataccctccatataatgttcctgatcagtcttatcaaaacctacccaagttgataaaacaacatccggagtatagccaacgatccattgatcttttgtaccaaatccataactatctggtacctcagttgaaccagtcttacctgctactctaaaacctgatggttgagctgatctcccagttcctgaagtaaatacgcctaaaagcattgatgtcatttctttagcagtattagttgaaataattctgtgactaccaggattattgttttgagcaataacatttccgctagcatcagtgattttagtaatacagtaggattgatttggtaaattaccttcgttagcaaaagcactataagctcttgccatctgcaatggtgaaacaccagttgaaagtccacctaaagctaatgccaagttttgatcactcttattaacgtgaatgccaaagttttccactgattgaacacccttgctgacaccaatcttatctaaaagccatactgctggtacatttttactttgagctagcgcttcatacattggaatcttatttgagtattgattatcaacattctttggctcatagccgttttttccaaatttttgcagtttattagaaagttcagaatcataatgatatccattctgcaaagctggtgaatagacagctagtggcttcatagtcgaacccggctgacgtttcatctgggtagcacggttatagccgcgaaagacatgttgtcctctaccaccaaccattgctcgaacagctccagtctttggatccattgcaacactagctccttgcaccttagtaccatcactggcatttggtgggaaattccagctttcttcaaaactatcttgcaaggcagtttgatagccagtgtctagcgtagtatagatcttcaatcctttgttcattacgtcttcttcttttaagccataacgatctattgcttcatcaaccacggcatcaaagaagtaagggtagcgatagccatcttcttgagaaaatgtatcatcaagagtaagcgtagtcttcttagcattatcagcttgtgtcttagaaatttttcctgtatcagccatcaatcctaaaacaacatttcgccttgcgattgcattatccatgtgatcaattggattatagtagcttggactacgaagcatacctgcaattgtagccgcttctcctaccgttacatcactagcattttttccaaagtagcgtcttgctgcatcttgaactccccaaacaccgttaccaaaataagcattattcagatacattgttaagatgtcttttttagaatagacacgattaatttcgatcgcaaaaaagagttcttctagttttctagaaaaagtctgcttttgcgtcaataatgcattcttggctaattgctgtgttaaggtagatccaccaccaacaatacctcggtggattaaactactgatggctgctcttgccatcccttttacactaaaacctggatttttataaaaagtcctgtcttctgtagcgatgacagcatcttgaatataaggcgatatctggttcagttccacaaaagatcccttttgtgagtatagggatccggccttctgatttttattatcataaattgtggttgtagtagaaagtgctgccttcatattagagatgttcgaagtttttaccttaacggtataatatgtacaaacgaacaaacaacaggacagtaatattaaaattaaccaacgccaaatttgaaaacgatggttgaagtttttaatcgctaaatgaacgcgatgccaaaactcatgattttgggaatgcataaaattaaaactcccttttcgtcaataaacctaatatgacgattttagcatatctttatttgaaaaatagtgttttaaaggttaaaaattagataaggtgaaaaaatgactatataccaatattcgctcatatatcccgactatttaatgccaatgagtgttgataagttaatgcgtaaattgcttattccaagaaaatggcggcactttttacgtagtgaaaagaaaatattagttaatggaaaatatttaccacttaattttctagtaaaacctggagataaaattgaaattcagcttgatcatattgaaagtgatcaacaaccttatcccgccagtggaaaattgcctaaagtggtctatgaagataatgatattttagtaattaataaacctgctggacaaaagacacatcccaatttaaatgaagaagatacggcattaaatgactgtgcaacttatttaggctatagtccttttattgttcacagattagatatgttgacaagtggacttttgttagtggccaaaaatcctgcggtcgtaccaattttaaacaggcaattaactgataaaacattgcatcgagaatatttagcctggatttctaactctccacaaataaaaaataccggtatcattgatcttccaattggccacgatccacatgatcaaagaaaaagaatggtgagacaagatggacaaaaagctgtgactcactatgaagtaataaaaagagataaagatcgaatactggtaaaacttacattagaaactggtcgaactcatcaaatcagagttcatttagctgctctcggtgccccaataattggtgatcccttatataattctgcttatcaagatggggaacaattacagttaacagcctttcaacttacctttagaaaaccctttagttttgaaaataaaacagtgaaattagagaaaaaataaaagagatatgccaaaacatatctcttttatttgtgcctcaaacaggagtcgaacctgcactcacttgcgtgaacagcgacctgaacgctgcgcgtctgccaattccgccattgaggcaactttttgaacacatctatcataccaaaaagttaataaagttggaaagaaaaattttaattacagaacaagataatttattttttctattattagtgcgttctagtcaacaaaacttcctgctgaaaattatgctttttatttctatttagttttctttttaaaaatactcaatccaagtgcagtaaacaagctactaatacctgccaaaactaagatagtactattgtttttacttcctgcctgtggcaagcttgcattatttctggaatttgaagctacatagccattattcatcttattatttattccagaggaaatatttttatggttacttatctccgtaaatttgttattcatgcttatttctagattcttttcaggtatctccaactttgaagctgataatgtagcggaaatatcattagttttgggttgatgattttgcttattctctagtgcatctagttttatgactgaattattattttgaactggtaatttttcaattgtcgattctgggctcttttttgaatcattaatgtagaagttagaatcgctatcttcacttactgtcttattctttttaagtgagtctaaatcataagctggtagttctatttgagcacctttatctacgctttcacctttcttaggtgagtctaaatcgtaggctggcagttccacctgagtcccttcgcctactgcttcgcctttcttaagtgagtctaaatcataagctggtagttctacttgagcacctttacctacgctttcgcctttcttaagtaaatctaaatcataagctggtaattctacttgagttccttctactactatttcacctttcttaagtgaatccaaatcataggatggtaattctacttgagttccttcgcctactgcttcacctttcttaagtgaatctgaatcataggttggcaactctacctgtgtgccgtcgcctactgtttcactcttcttaagtgagtctaaatcatgagctggtaattctagctgggtaccttcgcctactgtttcacctttcttaagtaaatctgaatcataggttggcaattccaacttagtgccgtcgcctactgattcactcttcttaagtgaatctaaatcataggatggtagttctaatttagtgccttcgcctactgcttcaccctttttaagtgagtctaagtcataagctggcaattctcgttgagtaccctcgcctactgtttcacccttcttgagtaaatctaaatcataggttggcaattccaacttagtcccttcatccaaaatttcaccatgcttactttgttcagcatttgcaaaaattgaacttctaaaatcatcagtctgcttgagttctgctgttaatatggcagcttttaagtcattaatcaaacttgattttttcccctgagctctaactgctaattcttgatcaacagtagtctgcattaaattctgcaaatcatcccaactattcaactgaatactctttttatccaacgtaatagtaattggtttaaagtcttggcgtttatcaatacgctccttgaacattgcttttttgaagattgcgtaatcattatcatattcaccattaaagatcttcgctaatgcgtatgtgtcactcagcgatttcttatcattttttgcatccttagcatacttattcgtaatataagaaataaaaccattggaccaacccttagcagctagtaattcaaaagcagtctttttaaaagtaatcccacctgaaacagaggttgagctctgaactgccgcgtaatctggtgcatacatagaaatcgtttgataactattagtgccataacttcctgcttgataaccacgactagcaataatattgttgtcaatgaaatcatcaattgtcattaacttatcagcaatttcagtactgattgggccagatactacatcggcctttttagcaggatcataactaatttgagagtacatcaattgcttatctttagccgatttacctaccattgcttgagcttcagcatagtcaagtaaataagttacatcaaaaaccccatgcatataatcttgcaagtcttttctagtttgaaaacgtgatgggcttttattcgtggttcgattattatcagcataaaaagttaatgcagtattcaagccataatttgcaaatgttcggtcccatggtgattcaagtagtcctgtagcgtatgtttctactcccgtacccggacgatgctgaaatccatctaagtaaatactattatcgaaattatgcgtcatttcgtgtgacagaattcctataccaccaaaattatttactacttgtgccacataatagcgtactgcattaccaacagcatctgccgaaagtccagccgcctcatacatcttacctaaagggccgaaaaattctgcaactgcaggaatatcggtatcacgtttatttagccatctccgaccaccttttttgctggaatcgatcgcattataactatcccagatctgaatatttgcgttgcttaagcgcttctttcccgcttcattagccatccgataccaaaaatcaaaatgatctctccatgcagtagaaagtcgggtaagttctttatgtactgcttgaactttttcttgatataccaccggatccttatggtatttcacatcaatatatggttcatatgatccaaatatcatcatccccaaagcagatacaacatacatatcatcgtttttaacatttaaaagcggtaagatatattcttgcagatctttatttgtagataagcgatgataaatattgagatttaaatcgggagcttcttttgatggaatttcaacaatatgaacgccagtatttgatctaaaccactcttcatcagatagatctggagtccactttttacgcaaatctcctaagaaagtaactaagtctgactgagtatttaataatggtgctaatttattattaaaagcagtcacagtatttgaaggagccagttcatcagttgaccagtctccaatcttagacaaccaatcgattgaatccaaattagagccaaaagcctttggatcaaacatcattactggtaagagttgcttgtctccatatgaaacgttataccaacgattaatgtaagacatccccaccataatagcacctgcattatcgctaaccctttgattagcagtatctatattatcggtgtgttcaagaagttgcggtactaaagtaggcaattgattatatacttcattaaagctatccactaaactactactagttagttgaatatgattccagtttctaagaacttgttttggatccccatcaaaggcatcatacttaacttgttttaagctatctgtaacagatttaacaagatcagcatcaactttcttttctgtttggactggttgctgatcactaatagtagcatcagagatgttattttctttattgttgatatcttgttttaaagtattcgcttcattatctacattattttgatcattttttaagtcttggttgacgtttgtagtatcgacatctgaatctgttttagtctctgtagttgtctgacttgttttgtcatcctgagaattgtcttgcgaatttatagtttctacctttgcaaggttatcatttgtattttctataacagtaatttcatttttattttctgaggtctgattttcagtcgtttgaacttgtggttcactatcagcatgaacagtcgttgttgtagcagccataaacgctaatcctacagcaacagaagttaatccaacactaagcttacgcaaagcatatcgatattgagaatgtttttgcatattaattctaggcctccaattttctataatttaagttatcttttaattataacttaagttatactgattttaaataagttaacttcacttaactgagaactaataatgccatagaaaaaataaaaaaaatgaggtatgaactcgaatatattcatacctcatttttatatactattgtttatcaattcttttgcatgcttaagaattggtaattctcgattggtaatcaattgtcccaacttagtatcaatttgttttccatatgcagcaactgcttcttcataggttaattttaaagtcaataagtgaaaatcatcaatttctgcttgcgttaagtgtttttcaccaaaagaatttattttacataaaaagtaattgttaatattatgccaatgaattaagttatagtagtcacttaccgtaccgattttacaaagaatattaacgttggcacctaatttctctttcagctctcttttaagtgctgttattaggtcttcgcctgattcaaccccaccaccagatgtttcaatgaaagtgcccgtaccaaaaatatcgtctctatgaacttttacaaaataatagttctgttgctcatctactacaatagctcgaacaatttgccgatcatgatcaatattagtcttaggccactgcgtatcttgcagttcaagttttaattcttgtatgtttattcctcctttttaatttaggctattctgataattatgacgcaagctacacggattttaaataggttaattttgcttaactaacggtgccatagaaaaatcgaaaaatattttctccaataaaatattttaattactcttttgaccttactcaaaacaaaaacctcattgaatcccggcttattacaccaagatctaataaggtttttaatctataattttcaaatatctttatactttatcactataaccttagtttaaatctaacttctgtaaaatctcatcataaactttatctgctcccatacctgttaaaagtggcaaaccgctgatcaccttatctttaacatcatcaggaactacagttgtgcttacaaaagcatcataatcatcaatattattaatttgttccgcaatatttccttttaacaattttaccttgtctaaaacacctttagattctaaaaaatcacgaattttaccttctactactgtagatgtagcaactccactaccacaaacaaccattaaagtcttcataataaatttctccttgtaaaatctaacttatagcgtattttcatttttcgctttatggaatttgttaaaccaaatcataaaacctaacgttactattccaattaagccaattccgccccaggtcattaactttccaagaccaacaattaaccaggtagtccatacaccaccatcactcataactgtgattgaactagcaccttgtaagccaaagtgtgctgctttagctgaggctgtgacaaatggagctacccaagaagcgatgtataaagtaatgataacatctactactcctccaataagcgttctaaaaatatctccaccaaatacagctgccataatagcaatcatatatggaatagtagctaagtctccaaatggaagggtactgtttcctggtaaaataactgcaattaacaaagtaattggtactaaaatcaaagctgaggaaagaactgtctcattaccagcagctaaagcactatccatccctatgtataagtttctaccagggaaacgtttcttaataaaatcatttgcaccttcagaaattggagttaagccttccattaaaagtgacaccattcgcggcattaaaaccaaaactgcagctgtaatcactcctagttgaagaacttttgctactgaatattttgctagaatcccaattacaatccctatgattaatcccataacagaaggttcaccgaaaacccccattcttttttgaactgttttaggagtaattttaatcttgttcattccaggaatacgatccattagccaatttaatggtaaggctagtaaaaatcctggatcagaagctccctgaggaaatgaaattccgggtaagccatattgtttttgaatatatggagccgacatgtctgctagcagataaataatcatgatatgcactaccatggtaaaaattccgagtgcaaaatcatttgtaattgcataaacaatcgagccggtaaaagctatatgccaataattccaaacatcaacatctaatgtcttagttaatccaattaaaagtaaaacaatatttgtaataactccaactggaatagctaaacttccaagtaccgtaccatatgctacagcagagcctgctggccaaccaatatccaatgttgaaagatgtaagccaaaattcttaaccatagcttgtgaggcaggccctaaattctttgttagcaattcaattactaaattcagtcctacaaatccaataccaacagttaagcctgctttaaaagctttacctggttttattcgtaaaattaacgcaaaaacaaataaaagtatcgggagcataacactagctccaaggttaacaaaccattgcaaacctgaactaatcgcattcataatcttatcctcttaatctaaattaataatgccatttttcttcatcactaaaataaattcatcaattgaagtaatactttgaagagcattcatggcctcttgattttgaaagagagccattaatttctgtaacatagtaagctgactatctgattgcttcaaagccagcataaaaatcatattaactggaatttcagtattgtctcccatttgatgaaaggtaattgattcttttaaacgcataaatccaatctgaggaacaataactttatctggatcacagtgcggaatggctactcccatcgtttgtgtcattaatcctgttggaaagctggattcgcgttttaatatagccggtgtgtactctttagttacagctccgactttgtataactcatcggccaattcagtcaatgcttcagttttagtcgaaggatttttgtcaaaaagtacaacttttttatcaaaaagcatctttttctcctacacttaaattaaataatttttctaattctttagaagataatgtagggtcttgaagactgctaattatcttctcatctactaaacaattaactagcgatatgattgaactatcatcagggcatgaaaatatataaatagcaatattgataccattactagtaaaatagctaacaggtttattcaattgactcacgattactatgctttcagtaatctcatgcgttactatgtggggcattattacatgttcagaaatctgcacacttcctagagcatcccgttcatggagtaagtttaataaattagtgcttagtccagatgaaagatcaagactggaaatagtttgctgaagccattgttcataattgctaatattatttagtttcactaactttattttcattcaaatacctactcaatctatttttatcctgagcattgaacatagcactggaaagaataacctgttcattattttgaggaaggacaggaatggttgaaataataaggtcaagatcagcgtattgagtagaatttttttcatactcatttttagaaatagttcctattaaatctaaatcgggaaaatttcgatgaatctttgcatatagtagttttgaagtgcctatcccactagcacacattacgatagctttttttgtaaagttagtttcttcaaagtatttagcgaaatacaaagttagaaaaccaatttcatcatcactaattttccatggtaaatatttattgctataagctttagagcttaaggtctttaatttactaaatgtttctctatattcgctttttatatcatcaagtaatttgttagcaattataatgtgattatttagacggttatacattggacgaatatgactaatcaaatcactttttaaagcttttgtttttggattattcacatctaagttaaaacctgcaatgtaataattagctagacgttttgaatctgcagaaatcttatcatcaatggcaaaatcatgattgtaacgcatagagataagatactctaataaatagtagatttcggcagtaggtatttctcggtgaacataatcagcagtattatgaattacgtcattactaactttccaaaaaatagaattatgttcttttaagtgatgatatttatttccaatgtttattttgtctttatactgaactgtttttcctcttctaaatcttttgattaaaatatataaatgagaaaaaatatttacattatagggataaggaacagtagtatgaagtgatttttgaatccattcaatttgtgtagttaaaaattgattatcatagctactcaaatcttcaaattcatttgccaaatcactgatactttccatattcattgctttactttgaataagtgcattattaattgctctacgtatattttcttcttcaccttttataactacgtaattaccttcatgggctaattttaagctatatttttttaataattcgctgattgtaagtaaatcttggcgaatcaactcggtacttacataatatgaagcataaacgtctttgacattaaccgacaatggtgcactaaaaagcaatttaatgattatttcatttcgtctttccaaaggtgactgaatcattaagtggggcttttcgtgaaaaccatcacttagctccagatacttttcataatccaaaagatatcctttccctctttcagatttaataatcggaaagtcgtaagtttggtttattttattcactgctcgataaatggttttagatgaaacaccaataatttgggccaattcttgtgacgtcataaaacgtccagactttactaaaatgctaataattttactgctatttttagacatcattcctccctccttaccttaagtttagcaattgctaatggtcacgaaagtaaaaaaatgtccatttcaacagacatttttgtcccttaattcacataatttatatttatacataaaactgagactataaaaatagcatgattactctaactttcagtaatcatgctatttttatagtctaattgtaatcagcaatccaagaattcagccttcgattttctatacttaaaagtacgcaaaagataatttcaacccctaccatactcattgacaaaatagcaggatcaaaattaagtccaatgattaatgcaaaaaatggaataataattgataaaacaaaatatacttttgatctatataaccagctaaacggcattaaatgcgcaccaaaaataattgccaataccataatcatcttttcaggaattgtaggataaatccacattgcaattaataaataaagcaattgatttagtgagaaaagaaggcctaaattggacaaaggattatctttattttgaaaatccacattaattatttttgaaattaaaaatgatagtggtaataacatccccgtacaaataaaggcaaaaagattcttagtaagaattggcaatccagaaaaataaattaccgtcattgcacaccaaataactactgaagccaaaataaaatgtagacctcttttttgcttttgagcacaatctagtctatattgatcgagttgtttcataaattgtatcctcgttattggtcttaagattttatatcattattttctaaaactgataaacacttttcaatctcttcggaagtcagtacatcactatattcttgcaacatttctgatcgaatctgctctgcgctaattccaaacttctttagcatagaaatattgtcctttagtcttttaatactttcttcttttagtgtcttgtttcttgttgcttctgctatatcatcgagcttgtcttgaaatgtcatcacttgcttcatcctctctggacttcttgaaaaatccaccatcgaatcttgcaattgttttgcatagccttttttatgactaaaaataccttgctccaaatcaaaaaattgctgcatatctggtgttacttggccttttattccttttgggttaagcataactaagtgggtaccattttgcaagaatagatctttagtctcattaaatgcaattcccttagaagtatattttttataaccatatccaaatggatcctcagtaaaaataaagataatataggtttctactagatccttataattagtacctttaggtgtataagaaacatcaagcacatcttgataatatctaatcctttttcctagttcatttggaactgtaatttgcatttcgatatcaaaaattctaccttgattatcttttgccaaaatatctgtgacgattgctttagaatttaagtattcatgcatctttttttgtgtttgaaacttgatctccacaatatttaattctggtaaagctgcttgtacaaacctcaaacaattatctttctgctccatcacccatttaaacactgggtccatagtgattcttacctgttgtagaatttctttttcattcatttgcttttctccaaattaatatttttcaatattaattacgcaaagaatcactttttttcagaaaaaaatatctaaaaattactcttacccaaacacttcggctgccgcaatcacatccagtagtgcctcatctaccttatctcttccatacgcatcaagaaagcgatcacgatacttattagttttcaaattaaaccagagtgtccaaatgccccaaaacaaatcaatatgtcgatcgccaactccgctgcaatcaacatcaatgaatcctgagaacttccaattatcaagaataatatttggtaaacaataatccccatggagtaaaactttgtcctgcaaagcatcttttcctgcttccaaaacctgatgtgcctcttctgctgatcggtaaccaaaactatcaggaaaagccgacttatcataatttcctgtttggtagtttttctcggtagttgctaaatactcactagttttctccataaccggacaatcagtgtaatctgtttcatgcagtcttcttaattcgcaagcaatggcatcacataagcgttccggatttgcgagatattctgaataaacacagtcttcgcccttcactgcccttgttaaaagccaatcataatcatttgcagtataatctaatacttctgcgctaagtccctttgaataaaagtactgcgtcatcttagcttctttttctaactttcccagtctagctctttttaaataatagccctcatctttatctacaaaatagacccttgcttcaggtgaagaggaactgttataaattggtgatccagagataaaatttctaatctcggttggtaaaacttctggaatctgagtaattaaagtttttttcatatatttaatcccatgggtaaaaatgaagtatacaaaagtaataattacaactctccataataatgatgcaaaatataatcagatgttctctttaaagttagatagtcaatattattagagaaaagcattatcatttgcttagttttgtagtcagccacaaagcaggaattatatcccggaatactcccctctgcgcgaattatatttcccttaaaatatactccgccaaagtaagctacctcttgacctttagtttgctgagaaaattggttaatcatcttagggtcttttaaaacttcgttataaacgaatttccaataatcatttggagatataaataaatttcctgctccaaagtcagaagatgtagtcactgttactgtatgccagctaacattttcgtttaatggttgcggaatttcttttttattaacttcggaaaaatcttttatctggttaagatgaagaggcttagcaaattgcttttgaatgtaattattataagttaaattactttctcgactaataattgctgctaataattcatagtccacatcctgataatcccaagtatgaagatgatcatattgcatatgatcaagcatatacgcaatttgttcttgctggtttttaagcggagcagatggacgagcattattaatcaatccacttgtatgattcattaattcccgaatcgttatatcactgcttcctggaacttgagggaaatatttagctaaagatgtattccaattgagttgctttttttgttgaagttggtaaattccagtccccgtcataattttttgtaaagaagcagttggaaacaattgattagccttcactatcttttctttattagtagtttcgttattttccactacaactggttttccatctttgccactgactaacattaccccattaatatgatgagacttcatgtagcttttaagctctttcggtgtatttcgacttcctggactcatcttatcggtcggtattacaaataaaagtaatgaaaaagcacaaagcgccatgatagtatatagaacaaatttttttagatgatgcataatattttcctctttgtgttatgccagtttttaatagagctttttcgtttattatctttctttaattgtaattcttgcatatcaagatcctcaacccttttgagacaaaaaaatatgctgcatgttttttacaaagcatacagcatttttttattttaataatcgttatttcttctccagtactgctacaacttcaacatgcagtgactggtttctgacaattgcacattggggataaacggtcatgtggcgtggttgactatgtctgtgtaatggtagttcttatatccacacaaccgttatgacccatggacttaagcattttcaacgttactcagagttaagaattttaatcagtctgtggaaacctattggtgccataaatcaagacagtgagtttgtgagaaactctaacaagatgctacctgtaccaaatataaggtttgccgtcgatatgttgaaaattatcttctcttaaatatataaatttgccatttacgatttcatacgtcttattgtgatcttcatcttttaaaagattaccactacgaactaacctcacattagggtaacaatcattgtcgtagtaatactttttgtcatcactccaaagtgtggtaccgtcatccactttataaaattcatccctcattttaaatcaccatcttattctgtctttcaattggtaaccagtacgttgtaaagtacaaagaattctcacattccttacccactgaatttggttcagggtgaaaagtattctcctcttccgctttacttatatcttgaaacttccaatgaagatcaaaaccctgcataacataattaatacattttctcccaaaaatcattgaagattttagtactggataaatcgataaatatatttcattagtaaaatgattaggatcaaaaaagcactcttgaggatacttgtgaattatactttgaagaagattccaagtattttcactgagtatcatatttaccatagttttagagctcactccctgcggaatattattgtgttcgatatcattacgcagtggcttattacaagatttaaaaagttttggaagtctgcattttctaatttttgacaaaataatagaaagcgtctctcgaaactcctaaccaggtccgaagacgatcaccactaggatcatcccagaatttcattttttcttgggcaattcgtcctgttgcttgaccaatgatatttattctggcagatgaagaagcatagtaaagtggcttgatcgcttgctttgtaaaagattcattatcaggatctgcttgaatttcttgaaaaattttttgaaattcactttgcatataatatgacccgcctttctcttattttctaaactgatataacgtgtatattatcaactaagcaataattgcctaattaaactaattttcgaataattcaattcgacgtaattgacgtttcagttgaccttgcttttctaataaagcaaatttacgagacagggtctcaggtgttgttccaaggtataaggctaagtccttcatttttaagggtaaggtaaaattatttttaccaatttcatctgcatatgtttgtaaatactttaataaccggtcttcaaccttcggcaaagccaacaagtgaatttgtttttgcatttccgaaactttaacaatatttagttccaataatcgaatacttaattctggctgtttatgcatcagcttcagtagatcctgccgttttaataaacaaatttcactgtgttccgtagcctcgacgtaattattgatatttttttgaccaaaaagccaattctcaccaatataatcacctgtatgcaagatttgcaaaacattctcatagccgtcttcatctaaggtgtactgcttagcgttaccatcagcgacaattactaaattatcatttatcgttggattaattatcactttacccttttgatagtttttatgctgaactaatttttcgatttgcatcttctcatcctgaggtaaggcattaaatagtggtactaagttaacacataaatcagccattaaattcatcgtcctttaattaaaagtcatcatcgtcgtcttcgacacacaatccttcttttagttcatgacctaagaagtcttgagttacccgaatttgctccttaatccaagccattaaattagttaaattagcagatagttctagccaactttcattgttagctaaagcaattgccttagtaatgaagagcgtttgcgtatcaaaatcttttaccaaggcaaacaattgcttatcacctgctaaatatttactactgccatcttcttctagcgtagaatattccttaaattgagctgtaattattggaatactttcaccattattaaccaataagtgattcaattggtcaaattcctgacgttcataagcaatccaaccagcagctttttcgcctaaaaaagactagcagatcctttagcaaataagttagcttggttaatctttaaagaatggattaataagttagaaataatgtgaccagtcatagcagctgcagttggctgatggtgatcaaggtcgctttgcttcaattccgcctggtatttttcttctgcattcatcagttaagctccttttccttaattccttgtacttcataacccattttttcaatagctgtcttgacgtcaacagttttagtcttatcaggatccagcgtaaattttagctttcctgcattgaataaaacttttatttggtcggttccatccaaactaccaaccgccctttcaattttgcttaagcatgaaggacaggtcatgccagataatttcatcattactttttccatgattaaattccctcttccttattaatttacatatctaatgctactttgttttgttgattataaacttgatgatcgtcaattttttgttgaaatttgattaatctcatcccgttcaagataacaattaagatactaaattcatgaataaacatcccacttgccatttcaacataacccgcaaacaaaccgatgaacaacaataagactgtcagtaaagccatcccgatattttcattcatgttcaaaattgtcttcttggataagccaagggcataagcaatcttccgcaagtcatttttaactaaaactatgtctgaaacttcaatggcaacatccgttccactaccaacggcaattgcaacattagcattagctaaggccggactatcattgatcccatcaccaataaaagcaatatggtgtcccttagctctttcttttttaacaaaagcagccttgtcttgtggcaacatttgaccatgaacttcatcgatcgacaacttcgccgcaattcgttcagcagtttcttgattgtctccagaaagcataactaactttttaactcctaattcttttaagcgggttaaagcagcattagcttctgggcgcaattgatctttaatgccaaaaacagctaattgactttggtcttcattagcaaaagcgacaattgaattacctaattgacttaaatgattaattgtcttatccaattttgcattaatacgggtattttcaacgattaagtcttggttacctaaataatatttttgattatttaaaatggcgatgattcccttacccttaacagtttccactttaattgaagctggcttttgtttatttaatttggcaattgcctgagctaagggatggttactttgatgctcaatttgagcagctaatttaataatttcatctttggacccatttaatacctcaattgcactaacttctggatgtccaacagtcaaagtgccggttttatcaaaagcaatttcatcaatccggtgagtttgatccattacttgcgaccctttaaacataatgccgcttttagcaccattaccgataccagcaactgtagatactggtacaccaataactagagcacctggacagcccagcaccatgaccgtaatagctaacttaagatctttagtaattaggcccacagcaatcgcaattacaagtacggcaggagtgtaatatttggaaaaccggttaattaacttttctgtatgtgactttgtatcttgtgcttcttcaaccatttcaataattttaccgaaagtcgtatcttcaccgactgcggtagtttcgacagtcaatgtaccgttttcaaggatagttcctgcatatacttcattaccggcttttttattaactaatttagattcaccgttaacactggcttcattaagataaccggaacctgaaataaccttgccatcgactggaacctgatcaccagttttaactaaaatcttctccccaggatcaatgaaatcgacgtcttctttctcagttgagccatcatcttgaacaactaacgcagtctgtggtgccattttggttaaatcagcaacggctgaccgggttttctttagggttaattcttccagtacatctcctaacatgaatagccaagtaacaatggctgcttcattaaatttaccaataatgaaggcaccgattaccgccagcgatactaaaacatcaatagaaattaatttaacccttaaagatgaaatagccgtcaaagcaattggaagtactccgacaatccccacgataagcatcaaagcctggtatggtaaattcatgtgcaatagccatttagatccttcagcaagcaacagcagaatagtattaacaagcaaaagctgctttttgtacctcataaaaaattgttgtaacttaatcatttttcccctctccctttcttgacactacacattataggtaaaaaacaatttaggtgacttgactattatcaagatactagtgtctttttatatttatcttttaagcaaaaaatcacagttttatcgtgtaaatttcgtttaataaaagagagaatatacaaaaaagactagaaaccatgcaaaaggcatggactctggctttcaaatttcagttctataaaaattaatgtgccaatttaatctctccagcagcaattggcaaagttgtatgtgcatcataactcataacattaccggcaacgctagatggcaatttaagatccgctggtacgccgtgaacataaactactcgtttgtctaattgaagatcgtcactaccaaatgcttgcttaaattttacttgtaaatcttttaatgggacatccttatcatattcataatgaccgtatttatctgcaaccgggtagccatcatggggaatgttcatttcttgtggtgcatcatcaaaatgaaccatcgttgtcccagatactacctctgtttcaggtaaatcaataaagccatcatgattcacatcctgcattagcgtcggaacatgagcttgtttcccatctggaaatccatggaaatgttcccaatgttcaatattggcaggcgtatcaaatatttccacatgaatatgaaggctattaccattttcactgaatgttgctattccatgcgcctgtgcttcaattttatccgcatttattggtttaatttttgcaatatagtcaactattactgtttctctcatcaacttaaccaactcaactccccaaaacggacacttatctacacaacctaaaaatccagcacgttgtccactcgaccctctagctcaacaagcaaaaagtgtactaattccaatcaccaaaagaggaattagtacacttccgattacctaaaaatgccgttacgccggcatttataacctatttttctgtacgttcaaggactgctacagcttcaacatgaggagtttgcgggaacatatcaactggatcaatttcatcaaagtcataaccttgttccttgaagagttgcaagtcacgcaccatggttgctggattacatgaaatataaacaatcttcttgggatttgtttccacagcagcgtcaataaattcaggagttaaaccttttcttggtgggtcaacaaagatgacgtcagtctttaagccttctttagcccagcgcggcattacttcttctgctttacctacaacatattctgcattagtgatgccgtttaatttagcatttgcattagcatcttcaacagcgggctcaatgacttccatcccccgcactgccttaacgtgcttagccacactaagcccaatggtaccaataccagaataagcatcgattacgacatcatccggcttaagatcagctttttgaatagctaaatcatacaaacgtggagtttgaagagaattaatttgaaagaaactttgtggagaaattttgaaactaacatccccaattttatcggtaatttgtggttctccccaaagcaagtaatcttttttacctaagatcacattcgtctttttaggattatggttcaaaactacgctagttacgcccttgatctcactaatttctttagtaacttcttttaattgtggaaaatctttatgtaagcatactaaaatcaccataatttcgcccgttgctttagagcggcgaacttcaagatagcgaacttctcccttattatgaatctcatcatatgcaggaacatgattctttctcaaaatgtcgcgtaccttaattaaaactcggtcaatctctggatccgtagtaaagaagctagttaacggcaccaagtcatgagaatgttttctaaaaaatccaatatcaagcttgccattaacttcacgtactggcacttgtgccttattccgataacctgtttcttctggactaggcatcgtttgacctactttaacattatctaaatctgctttatgtagtaaattaacaacttgattacgtttaaattcaagctgtttatcatatttaatatgagcaagagatgctagccccgtttgaacccattggcgaagtttcacgttaatccggtctggactctcttttttaattttttcaattttagcaaaagcaaaatttttctttacttttaaaagtttggcagaaacaatctcacctggaagagcgttatttacaaaaaccgtcattccatctagatgagcaacccccattgcttcataagacaagtctgtaatttctaagtcaactatttgatttttttgcataattcaatcctcaatatttagatccttgttactattttactaaaaaatattattgctttttaaaagagtacgcactaaaaatacttaagataattcctaaaattaaaccgcaaattactaagctccatgatccaaagacaaagtcgccttttatccacagattatttaagaccatcccccagtcaaatggccaccacatgctccaagttgtatgacttaaaaacattgctaaaatagatcctaaaaaaccaattcctaatgcaaaatatagattagtaattcgtacgagccaagaataaaatggcaccagccataaagatgctaataaaactccaattattgaacaaatcattaagcttatttcttcggtactcgaaaaaataaaacgaacgcagatcatcaaaactataaaaatcacgctcatgatacatgcttgaataattccatggagaatcctcccaatttcatagctcaataagtcttgtggagatgtcagtatttctctaaattttgtagcttgcttttgataataagtactaagaccaacaagtagtccaattgacatatttaaccagaagtaactccattggcccatcattaattgaactagatattggttatcccagaaaacagcagtcatcatcaaaacagcaatcactggtagtagccatactaataagcgaactacactatgttttgtttttaaaaattcaacttttaaaatattagtcatgctttatgcctgccttttctaaagttgagataaataattcttctaaatctgtttctggttcatagtcttcttctaggagcaattttccatcacctaaaatagcaattcgatctgcaaccttttgaatttcagaaagcatgtggctagctataattattgtttttccttgttttttctctagcatcaaaagctcacgcaactcatgaataccaaaagtatcaagaccatttgttggttcatccaaaataactaaatcaggatttcccataaaagccaaggcaattcctaagcgctgtctcatccctgtagaaaagcctttgactttttcatgattatgatcaccaaaacctaatgtatttaatatttgttcctgatttttattttcaacacggtgaagttttagttttaatttgatgttttcttcaaccgttaagttatcaaacaatccaggctcttcaattaaggagccaattacttttaaatcttctctcttccaatttttatctttgaaagtaactactccttcagttggcttttcaattccactaattatttttagtaatgttgattttcctgctccatttggtcccataatacagtagattttgccagtcggaacattaaggttaatttgatctagaacacgcttatgtttaaaattttttcctaattctttggtggttaaaatatcattcatcttaatccctcaatttaaatttttagtttttctatacctatctattttaccgctcagaccacataattcgaaatcttattatttttattaataaattcattgacatctttttttaagcttgctatcataattgcaataattatcgtcacagtagtgcttatgttaagcgtcagagagctggtggtgaagtgcgaaccagtcaggcataagttacgaattacaacgattcatctttattcggccacaatcagtgccgttaccacctgattagagtgctgcaatctgcagtaaataggtggtaccacggtaatgcgtcctgttgattaatttcaacaggacttttttattggaggatttttatgaaaaagaaagtttcttttccagaagcgatcattatcttactcttgcttctacttattttaggcatttcagttattaagtttggactgatgccggaagttcccgttctatttacagtatgtttattattattttggcttagaattcgtggaaatgattggtcttcaattcaagacggaatcaaagaaggaattggtgtagctattattccaatttttatttttatcttaattggggccttaatcgggctatggattaaaggaagtattatcccatcaatcatggtactgggcttccacctaattagtggtcaattttttgttccatctgtctttattgtctgttcaattgttggtcttgctatcggaagtggctttacaacaatttcaactgtcggtattgcactctttggaattggagctagtatgaatgctaatccagctcttgttgctggtgcaattatttcgggagcagtttttggagataaaatgtcccctttatctgactcaactaatctttcttctgcagttgcagaaagtgaattatttgcccacataaagaacatgatgtggtccaccattcctgcctctgttgtttctttaatccttttttggattctaggaaacagtggttcaatcgatgcttcaaaaattaatcacaccgtttctatcttagagcataactttaatattacttggtgggcaatcgtaccaatcttattgatgttaatctgtgcatggcgcaagattcccgcaattcctaccttatttttaaacattactgttacagtcattatgatttttattcaaaatccgcaccaatccattactgacttaactaacttaattatgaatggttttgtagcaaaaactagtgattcatctgttaatgcccttttaaccagaggtggtatctccagcatgatggatactgttggtttaattattgccaccttatctcttggtggactcctcatgaaattcaatattgttcaaactgctatggaaccgctagttgaacatctcaaaaaaccgggccgtttagtcatcactactattctttcaggcatttgtatcaacttatttgttggtgaacaatacctatcagtaattttgcctggtcgtgcctttaaacaagcttacgaccgaattgggcttcacccacttgccttaagtcgagttcttgaagatggaggaagtgtaattaactacttaattccatggggagtagctggttcttttgccgcttctactctcggtgttccagttttagccttcattccctttaccttctttagtttactttccccacttttctcaattctttccggggttacggggattggtttaaaatggcaaaagaatcctaaaaattaattcatctcattaaatccgtactatatgcgcctacacagcaaaatagtacggattttttattgacgaatttttaattacattgtaaattattagtaattaaaaaaatattaaagaggaggagtttgatgacaacaaatcattttctagtactacaaactgattttggcttaaaagatggggctgttagtgccatgcacggagtagcacatatggttgcgccacatgttattgtgtccgacttaactcatgagattccgccttatgatatttgggctgcttcgtatcgtctatatcaaactattaagtactggccaaaaggaacgacttttgtttcagttgttgatccaggagtgggatctaaccgaaaaagtattgccgctaaaacccaaagtggccaatttatcattacaccagacaatggttccttaactcatgttgcaacttatatggggctagaagaagtacgagagattgatgaacaaaagaatcgtcttccatattcttcagaaagtaacacttttcatggccgtgacatctatgcttacaatggggctttactcgctgagggagaaaaatcttttgaagatttaggcgaaacattagatccaacttcgattgttaaactaccacttactgaggctagtctagaaaacgatcatctacgcggatcaattgatgttttagatattcgctttggttctttatggactaatattccttatgatttaattaaaaaggcgaatattcaacgcggtgataaacttactgttactattacttatcaagaccaagtttattatcatgatacaataccttttgtccggtcttttgccgatgcaccaatcagtgatcctttaatctatattaattcactagttaatgtcggcatcgccttaaaccaagcttcatttgcggatacgtataatattggtacaggaaatgattggaaaattgatttaataaaagaataatttatttacgggggaaaattatgaataatcaaaaaggcttatcagtaaaaagtgtggttgcaattggtattggagctgccatttatgttattttagctcgttttacatcaattccaactggtattccaaacactaacattgaaatcgtatatccatttttagcattacttgcaaccatttatggaccagttgttggtttttccgtgggattcattggtcatgccctaagtgatttcttaatgtatggacaaacttggtggagctgggtacttgcaactgctgtcctaggtttaatcattggactttatggcatgcgtcttgatttagagaacggtgttttcactactaaacaaatgattggttttaacattgtccaaattattgctaacgttgtttcttggttaatcatcgctccagttggagatattttgatttacagtgaacctcaaaacaaagttttcttacaaggagcaactgcaaccatcactaactcaatctctatccttattctaggaactatcttgcttaaagcttatgcagcgactaaagttaaaaaaggtagtttacgtagagattaattatgaaaggttactcaattaatgacagaacctattattgaatttaaagatttttcatttaaatataatagccaagcagaacctactcttaaaaatattaatttgaagattaataaaggagaaaaaattcttttggctggaccttcaggcagcggcaaatccacaattggtcgctgccttaatggtcttattccaaatatcgatcaaggtgaagttaaaggaaaatgtttagtgaatggaaaagatattactagcacaagtctttttgatttttcattcactacttcaactatcttacaagatgctgatagtcaattcattggcctaacagttggtgaagatatcgcttttgctttagaaaatgactgtcaacctaaagataaaatgcaccaaactgtaaaccagtgggctaatgagttaaaaatcaaagaactacttactcaatctccacaaagtctttctggaggtcaaaaacaaattgttgccttagctggagttttagtcgacgagtcacctattttattattcgatgagccacttgctaatctagatcctgcttctgggcttaaaacgatggcaattatcgataaaattcaaaaggaacttaatgcgacagttataattattgaacatcgcgtagaagaagtcctcagtcaactaattgacagaattattttagtaaatgaaggtacgattgttgctgatcagcctactaatcaattgctccactcaaacaccttagaaaaaattggcgttagagagcccctatatctaaaggctcttacagccgctgatgtaaatctaagttctattaaagaagtagaccagatatcaactctccctgtttctgaaaaaatcagcgataaattagcagcttggactaaacaagctaaaatcaccaaaaaagaagtagataatttaccattattaaaattagatcacgttggtcatcaatacagcaagaatcagccctatcccttaaaagatgtttctactactattaatcagggcgactttatttcaatagttggacaaaatggtgcaggtaaaactaccctttgccgaactatttgtggttttatttctaacgaaggaaaaatcactcttaaggaccagaatttaagtgacttatcaattaaagagagagccgaaaaaattggctacgtaatgcaagatcctaatcaaatgatttctcaaaaaatgatctttgatgaaattgctctaggtttacgtttacgcaatgttgatgaagaaacaattaagcaaaaagttgaccaaacgttgaaaatttgtggactttatccctttagacattggccaatttccgcattaagttttggacagaaaaagcgtgtcacaattgctgcaattttggtcttagaaccagagattattattttagatgagccaactgctggtcaagactggaagacctatacggaaattatgagctttttaaagcatctaaacactatggggaaaacaatcattattatcacgcatgatatgcacttgatgcttgagtacactagtcgatctctagcatttgctaagggaaaattaattgcagatactaccccaattgaattattaaccaatcaagctttaattaaagaagcctcattaaagcgcactagtctttacgacctggcaaaacattataacttacctgatccaaataaatttgtgcaggcttatattaattttgaacaacaaaactggaaggatgaagattatgaatgatagtaaaattttgggctaccagccaggtaatagttttattcatgctctcaatgctactacaaaaatgatctttttaatcctggtatccattgcttgtatggttacctatgatactcgcttcttgattgctatctgtatcctatccttaattttgttaaaaattgctggcatcaaatggaagcaagtttcttttattgttaaattcattattgtttttgccattattaatatcatcgctgtttttatttttcagccaacttatggtgagacactctaccattcaaaaacggttctaatcaatgcaggatacttcactttaactgcacaggaactattttatttatttaacgtaattttgaagtatatctgttctatccccttggttctactctttttattaactactaaccctagtcaatttgcagctagtctaaataaaattggggtcagttataaagttgcctatgcggtttctctagccttacgctatatacctaatattcaggaaagttactggtcaatttctgcagctcaacaagcaagaggaaatgaactttctaaaaaagcttctcttggaaaaagaattcatggaactttaaatattgttactccacttattttttcaagtcttgatcgtattgatacaattagcaccgcaatgcaacttagacgctttggttctaaaaagaaacgtacttggtatgttgcagaaaatttcaacttagctgattatctagttactactttggcttttattcttgtactagttgtaattttgctctttaaagtcaactcaggacgtttctataatccttttgtataaaagtttcttttactgccaagataagttaaaatatactaataaaaagaaagagggagagctttatgaataacttttcacaagaaccagaacgccgtacaattgtcgacgtaactggtttaaatagattcttaagcagaatgtacggcatgatgacaattgctgttttagtatctgccttaagtgcttacttaacaatgactgtctttagaacacaagttatgaccttatttgctagcaatccagcaatgacttggattttattgctagttccacttgctttaacttttggaattagttttagagcaacgagaaatccggtagctagctttgtaatgctaatgatcatggcaattgtttatggagttgaattttcattaattgctggtgcttatactggccacagcattgcttctgcattcgtagcttcttctactgtattcattacaatggctgtaattggtaccacaactaaaaagaacttaaataatttaggatcatatgcttctgcagctttaattggattaattgttgcaatgctaatcaacatgttcttaagaaatccaatggtttcttacattttctcatttattgcagttattatctttactattttaactgcttgggatgcacaaagaatgaagcaaatctacgaaaactacagtggccaagtttctgttgacggcttagcagttgcgggtgctttggcactttacttagatttcgttaacttattcttacaattcttacagatctttggatttagcgatagaaattaatattctacataaaaagctactaaatcttggtgttaaaaccttgatttagtagcttttttggtttgcattatttattactcaattttgccaataatttcattctcataagtttgatcatgaactgcttcaatattttcatcaaaattgaattctgctgtatgcttatttttaagcttaactttataagtagctcccatcttgaaccattcatattctgagtcaatatgacctaaatcgatcaattgattatctaaatcttggagatcatccacgattaccttagctgttggtccaagcattaatagaactaatctatcttctgcattttctcgaatcatttgttctattttattaactttttggtatgcatttcttgatggtgcaagaattcttttaaccgacttggtgttatcaaataagtcgttacccactcctgaacgtgttaacgctccttcaacaattaagatatctttttctttccaaatttgcttaagtttattaaaccaaccagcacttttagccttatcaattcgatcaatatatgggcgagaaataaaagtattactatagatattttctgttttttctacttcgcttagaagatactgattgttaaaaaagaaattagtttcataaaaatcttttgtatattgaccataatcctctaaactttcaaatacatctggaagggctacatcgtatttattattaccgcccgcaaaaagtatctgttttaattttttcgatagatccttattatatgcttgataagtaataccttttccattaatcaaactcaattctccatccccaaaacgaataatggattttttctcattaataagtcgatctagcgattcatccattcctctgacatgtatattaaaaagctgaggaactacgtggtcagtaggacgttttactaacttttggattacctctgccatttcatcaatttgatcatcttcaaagacttgataggcatcataatttctactttcagatcttgaagaattaaaggccaaaataggaacttgccgacgcttaatccgattaagtaccattttatttttatcaccataattaatatcaaggtaaacggtgcacttattaataagctcaatttgttttttagccgtagcacttgggtatatagttacattatcatattgagataaatgacttaataaaaaggcaactggagtaaatgctgcaatactaaagtgaatattaggtaatttttttactagctcttctaaattttgaacttcagcgacattcgtaaatatataggcctctccgtcaaaggtcttatcataattgtcatttaattcaaagtttctaaaaataatttttgaccattctaaattgtggtactcccaccatttctctcttagttcagttgtatcagtgatgttaaatggcttatctcgctcagtaaaatgaataatagcaggctcttttatatgatcaaagaatgcataaaaactgtctttatcattccaataactttttctctcatagccaatttgataattatattttggatctaactttccataattctgcgcaaatcctgcattcatcataacctgggtgttatttaaattatatttcttccctaaatccaataattggtttccgatattgttgttataccaaaatctattattaattaataagactcctgaattaaattgatcaggattaaagtagtccactacagtatacaaaggtctattttcaatattagtttcaaaaagctgatctaaattttggtccacaattacatcactatctaaataaagaactttatcttctttaattaattctggaatcaaaaatttgccatataccatcttagaaattcgattttcaggatttggcatatctttaaaacgactaagatcaatttttaaatcgataacttctgagtttagacttttcaaatattgattaatattcataaaccactcatgtggaatatcaggattaataatataagtttttacatcttgattatgcgcataaatggactttaaagtggtctctgctttatcaatccagccatagtctacacttaaggcaattgtcttcattattcaatcttcccaataatttcattttcataagctttatcatgaacagcattaatattttcatcaaaattaaactctgcagtatgcttattttcaagcttaactttatgagtagctcccatcttgaaccattcatattctgaatcaatatgacctaaatcaatgatttgattctctaaatcttgcaaatcatccacaactactttggctgttggcccgagcatcaacaaaatcaacctatcttctgcattttctcgaatcatttgttctatttgatcaattttttggtatgcattctttgatggagcaagaattcttttaattgatttagtattagtgaataaatcatttcctactcctgaacgcgttagtgctccctctacgattagcagatcacgaccactccaaagttgtttcaatttattaaagtaaacagcacttttacttttatcaactagatcaatgtatggtcttgaaataaaagttgaaccataccaattaccagtttgtccaatttcttttaagaaactttcattatttggaaagaaagatttttcgtagaatgattgagtaaaatcttgataacgctctggtttggtaaacacatcaggtaaacaaaccaatgtattattaaattggccccgcaaaataatatcttttagtcgattggcaagttctgaatcatatgtttgatagggaattgaggctcctctaattaaatcaaattcgccatccccaaagcgaatcacagatttattatcttgcaaaatcaagtttaaggattcatccatatcttttactctaatattatattttggagcattagtttttactgtctctttaatcgcttctgccatttcatcaatttgattatcacgaaagacttgataattatcataatccaaattttgagacttagtctgatcaaaagaaaagataggtatccttctcttcataattctttcaattatttcatcagctttaggaccataattaatatccaaataaatatctgcttcatttatttctctatccaaaggttttcctataatagtcgggaaaagtctcacattatcatattgtgttaatttcaataaaagaaaagccataggcgtatacgcagcaatattgaatcttatatttggcaatttttgaatcaactgttcaatattctgtacgtccgccatacgagtaagcaaaaatgcctctccatcaaaagatagatctttaattttactcttatcaaaactactatatttagaaataatttctgaccattctagtcttctataatgccaccatttgtttcgtaaactaactgttgatactaagttaaatggcttgtcttcagtaataaagtggattatttttggttttttaactttatcaagaaattgtgtagttttttgcagatttccccaaaaagctgctttttcaaaaccaatttggtaattataagataaatctagttcttcaattttatctttaaatacttcattaatgacagtctgatcaccatttcgaagattaggcccttttgctttttctaaaaggctagaaactatgttactttccttccactttttattattaatcaataacattcccgaattaaattctgcaggaacttgatagtcacgcacaccacaaacccatttattttctaaatcaatattaaataattcatctaaattggcattcacaactgtatcacaatctaaatatagtactttatcttctttaattaattcaggaattagtattctcgcaaaagcaatatttttaattcctttaaaagaagaattaacgtcatttaaatatgcctgatcaatttttttatctacaatttgtgaccctatttgactgagatattgattcaaattaatgaaccattcgtgtggaatatcaggattgataacatagatttttactttctgattatgataaataattgatttaactgttgtttcaattttatctaagaatccataatcaccatttaacactatcgttttcaaacttatcactcatttctattaatatttaaacatctaactttcacgaatcgcataatatattatctactaaaaatacattatataacacttatattctatttatctataagtatctaatacacttacaaattgttttgagattgtagataaacaaattaaacgtactacgctatagttaagtgcaaaatcaaagataacactatataaaataaaaggaatcaaatagataacttatacctacttgattcctcattaagagcttttatttcttatttattttcataattatttctttttggtactgaggattatcttcttcattcagatttttatccacagattctgccatatgtttatttttaccaatcgatactacatatttagcatccatcttaaaccattcatattttgtatcaatatgcccaatgtcaaggatctgattatctaaatcttgtaaatcattgacaattactttggctgtaggtcctaacattaataaaatcaacttattctgagcattatttctaatcgcttcttcaatttcatgtacttcatcgtaagcatcttcagcaggacaaattatacgctgaattgatcttacattttcaaaaagatcattgcctactcctgaacgagtatattccccttccacaatcaaaatatccttattctgccaaattttcctaagtttatggaaataatgttgacttttactcttatccttgaaactcatatacattctagacataaatgtcgagccatatgaatacttcgtcttttcaatttctttaaaaaagtcactaaatctcggtaacactcctacagcataataaccacgcatttcattatatctgtctaaattagtaaagatatccggtaaacaagttaatacccttggattatggttatttagaatactatcttttaatatcttcgctaactctggattaaaatgttgataaataatgtcttcaccatatatcaagtctagttcaccatctccaattcgcaccacagatttcttattttcaattatttcatctaaagtttcatcaattgatttaactgaaatatcaaaaatatcatcaaaagacttcttagaactattagctggtaatttattaacttgttttatcatctcatccatactgtcagctacgtaataattattactctgttcatgatattgagtatccctaaaagcaaaagtaggaatatccagcaatttcaatacagtttcgaaatggacattcttattgccatagccaatatcaaaacaaagatctgttttttcgataattgactttaattggtaatttaaaatttgaggataaagggttgcattcccattttgcgttaaaatgtctaaacctgtatataatgcccgtcccgaaacaatattaaaatgaatatttggtaagcgcctgattaagttcttgtgcgccatgattttctgcgtaattcaaaaaaataatagcttctttatcaaatttattttcaagtctgttagaagttagatgattgattacttctgaccattcactactatgataattccaccactttttacttaagtttttagatgaactttctctaattagcctactatcactagcatattaaataattgcaggcctctcaacagtgtctacataatacagatatgaatttgttaattcaaaattaggatctccaaatccaatttgataattgtaaatttcaggcaactttccaatattgataccaaacccatcattaatcatagcttgctcataaactagaccataatttttgcttagttctaaaaattgattaccaatattgttattgcgccagtagatattatttataagcataacacccatattaaacttatcgggatgtacaaaatcaattattgcatacaaaggcttatcttctacatcaattgcaaatagatcatctaaattttgatcaataattgtattgttacctaagtaaagcacttcatcttcatctactagctcaggaattaaaaatttgccatataaaagcaaaaacactgatatatcaacgtttatttaacgatgattatcagtgttttcttcattttaaatacctattttttattattttttctggatcttaaccctaataatgctcccaagctagctgcaattattcctaacaaactggaattatttttagtacccgtttgtggaagcttctggttacgaggccgctttgccattctattagtcttatttactttaattattccaattgattcggaatttcttctatttgaagatagacgcttttcgctagcaataggtgtaactgagtttgcttgtcctgtttcacttcttagtgaatttgcaggaatttcagaaggtatcaaactttgagaagctgaaacattcgaggtacttaagctttcactagtatttgttgaacgcatagatttagaagtaatagaagtagagaaactagtggattcagagactctttcgctcatgcttaccgagttagataagctctcaatcatcgatactgagttgttcatgctttcactcattgagaccgaattacttaaactttcgctcatcgatactgagttgcttaagctttcactcatgcttactgagttgctcatactctcactcattgagaccgagttgctcatgctttcgctcattgatactgaattgcttaagctttcactcatgcttactgagttagataagctctcgctcatcgatactgagttgctcagactttcactcattgacactgagttgcttaggctttcgctcattgacactgagttactcaagctttcactcatcgatactgagttgcttaggctttcactcatgcttactgagttacttaagctttcgctcattgatactgagttactcatgctttcactcattgacactgagttgcttaagctttcgctcatcgatactgagttgctcagactttcactcattgacactgagttgcttaagctttcgctcattgacactgagttactcatgctttcactcatcgatactgagttgctcaagctctcactcattgacactgagttgcttagactttcactcattgacactgagttgcttaggctctcactcatgcttactgagttagataagctctcgctcatcgatactgagttgctcagactttcactcattgacactgagttgcttaggctctcactcatgcttactgagttacttaagctttcgctcattgatacggagttgcttaggctttcgctcattgatactgagttactcatgctttcactcattgacactgagttgcttaagctttcgctcatacttactgagttacttaagctttcactcatcgacactgagttgcttagactttcgctcatacttactgagttacttaagctttcactcatcgacactgagttgcttagactttcactcatgcttactgagttactcaaactctcgctcattgatactgagttacttaagctttcgctcattgatactgagttgcttaggctttcactcatgcttactgagttacttaagctttcgctcattgatacggagttgcttaggctttcgctcattgatactgagttactcatgctttcactcattgacactgagttgcttaaactttcactcatgcttactgagttacttaagctttcactcattgatactgagttactcatgctttcactcatgcttactgagttagacaagctctcactcattgatactgagttgcttaagctttcactcatgcttactgagttactcaaactctcgctcattgatactgagttgcttaagctttcactcatgcttactgagttactcaaactctcgctcattgatactgagttactcatgctttcgctcattgatactgagttgcttaggctttcgctcatgcttactgagttactcatgctttcgctcatgcttactgagttactcatgctttcactcatgcttactgagttgcttaagctttcactcattgatacggagttgcttaggctttcactcatgcttactgagttactcaagctctcactcattgatactgagttactcaaactttcgctcatgcttactgagttacttaagctttcgctcattgatacggagttgcttaggctttcactcatgcttactgagttacttaaactttcgctcatagatactgagttgcttaagctttcgctcatgcatactgagttactcaagctttcgctcattgatactgagttgcttaagctttcgctcattgatactgagttgcttaagctttcgctcattgatactgagttgcttaagctttcgctcattgatactgagttgcttaagctttcactcattgacactgagttgcttaagctttcgctcacgcatactgagttactcaagctttcactcattgaaacggagttgcttaggctttcactcaggcttactgagttacttaaactttcgctcattgacactgagatgcttaagctttcactcatcgacactgagttgctcatactctcgctcattgataccgagttgcttaaactttcactcatgcttactgagttgctcatgcttccactcatcgatactgagttacttatgctctcgctcattgatactgagttgcttagactttcactcatcgacactgagttacttatgctttcgctcattgacactgagctactcaaactttcgctcattgataccgagttgcttaaactttcactcatgcttactgagttacttaaactctcactcattgagacagagtcgcttaagctttcgctcattgacactgagttgcttagactttcactcatcgataccgagttgctcatactctcgctcattgataccgagttgcttaagctctcactcatgtttactgagttactcaaactttcgctcatacttactgagttgctcatgctttcactcattgatactgagttacttatgctctcgctcattgatactgagttactcagtctctcactcattgagaccgagttacttatgctttcgctcattgatactgagttgcttagactttcactcattgacactgagttgcttaagctttcactcatgcttactgagttacttatgctttcactcatgcttactgagttactcaaactctcgctcattgatactgagttagataagctctcgctcatcgatactgagttgcttaagctttcactcatgcttactgagttagataagctttcgctcattgacactgagttgcttaagctctcactcattgacactgagttagataagctttcactcatcgatactgagttactcatgctttcgctcattgatactgagttacttaagctttcactcatgcttactgagttagataagctttcactcattgatactgagttacttaagctttcactcatgcttactgagttgcttaaactttcgctcatcgatactgagttgcttaggctttcactcatgcttactgagttgcttaagctttcactcatcgatacggagttacttaggctttcactcatgcttactgagttgctcaaactctcgctcattgatactgagttgcttagactttcactcatgcttactgagttacttgagctttcgctcattgatactgagttagataagctctcgctcatcgatactgagttacttaggctttcactcattgacaatgagttgcttaagctttcactcatcgatacggagttgcttaagctttcactcatgcttactaagttgctcaaactctcgctcattgatactgagttgcttaggctttcgctcatcgatactgagttactcatgctttcgctcattgacactgagttactcatgctttcactcatcgatacggagttgcttaagctttcgctcatcgatactgagttactcaaactttcactcattgacactgagttgcttaagctttcactcactgagttgctcagactttcactcattgacactgagttgcttaagctttcgctcattgacactgagttactcaagctttcactcatcgatactgagttgctcaagctctcactcattgacactgagttgcttagactttcactcattgacactgagttgcttaggctctcactcatgcttactgagttagataagctctcgctcatcgatactgagttgctcaagctctcactcattgacactgagttactcaagctttcactcatcgatactgagttgctcaagctttcactcatcgacactgagttgcttagactttcactcatgcttactgagttactcaaactctcgctcattgatactgagttacttaagctttcgctcattgatactgagttgcttaggctttcactcatgcttactgagttacttaagctttcgctcattgatactgagttgcttaggctttcgctcattgatactgagttgcttaggctttcgctcatgcttactgagttactcatgctttcactcattgacactgagttgcttaagctttcactcatacttactgagttacttaagctttcgctcatgcttactgagttactcatgctttcactcatgcttactgagttgcttaggctttcactcatgcttactgagttactcaagctctcactcattgatactgagttactcaaactttcgctcatgcttactgagttacttaagctttcgctcattgatactgagttgcttaggctttcactcatgcttactgagttgctcaaactctcgctcattgatactgagttgcttagactttcactcatgcttactgagttacttgagctttcgctcattgatactgagttagataagctctcgctcatcgatactgcgttgcttaggctgttgctcatgctttcgctatgagatattactatactctcactttgtgaagcactaatacttgccgtatctattttacgtaagtaaacagtaaatttattaggaccatctcctaatgatccatatacatatttacttaagtcacttatagatacaccatctggtggagttaatacttgaccagtttggttatcgacaactttctcaagaatatatccttcactttctaacccctctaatgtcgcagtagcatctgaaaaaataattgttccttcagcaggtccttggaaattattcgtagcttgcgtaagtgtaattggatttgaaggattagtatcattaataaattcaagtgtagcagttcttgtattagtagaatcacttgagttggtaacatctccattaacaccataggcaataccagctttccaagtattccaatcgatagtatttggtaaaggaactgtatctcctgtaacattatttgtaatagtcataaccgggtgtgctgtattttgcaatgctgcttgtaaggctgtattacttgtagctgcacccatattaggagtattttcatagttattcttatctacagtaggtgatttatcaagatcttcctgatatgacttgatatcatctggcattgtaaaaccatttgcacttactgttaaaggaataatcaatccctttaatctaattgaagagtcagcaattttaacatgataaaccatttcaatttcaccattagctgtagtggtttcttcatgtgttactgtaactggcgaagtcatttgactaactttatttatttcattcttcaaataaacatttgtaggagaacttccagcaacttcattgcttaattcattatttacataccatgcatagatgctcttaatccggtcttccatctggctgtccgtaagccaagtataagtaaattctttactattccctacagtaatcgcaatatcaaaattagagcccgtattagcttcagaagtagctgctccactagtagcaatcttaaagcctatagcattggcccaattagtatttatggagacactattatttggtccccataccctattgttattataaaaaatacctgctgtagtagtattgttacaatcaagatattgcttgtcatagacatattgcccttgaatgtgaaggccactagcgtaatgttgtccatttattgtcacatcattggtaggagtataagcaaataaagttccatttttagattcatcatcagtatattgataaacataaacttttcctaaattagtggtattatcactaccttgattaatactaatggatggttgttgggactgtggatttccccatcttaatatcggattaagagttaacttattattaccactggtataagctgcagcttctgaattaaaaactattctatagtacgtacccatattataagcagtagctatttgaactccattaggagtcattaaggggagattagctgctaatttactatcataattttcaatattcccattactatcgggtagtcccaaatggacgtcaatatattgaccatcttgcaaagtttgttttggagtaattgaaaaggcgagctgttcatacccagcatcgctactggtttctccagcaactggtgtcactttaatattactgatggtataggcagtagtcggtaattgctctttccctacctgtattgtataagtaacacttccactactattagcagcttggttacttggatcagtccaattaacagtttgtgggctttttacaacagtgaccgctccatcacttgtattaaatgtataagttccataggttgtactagaatagttagaaacttctgctaccaaaggcgcagttgcatttgaataagtgtgactaccaccagtgttgccattaaagtttgggctcaatttaactgatcccattactgaattagttgtaaaattaggcgttgtcccagttaatgatacttcaaaaagttgttctccatttggtccataattgcctaaatctttaactgataccgtaccggagtatccactggtatcaaaactgaagtcatctgtagtagctgtaaatccatcgggtaccattacaataaatttaggattttgaactgtagattccccagttgttgataaacggaaactataagttggcactgaatctccactgtacgtttttccatttgcatcaagaattgcagtccctgtaaatgtaggaagcaaatttgtatttattgcatagttaataatcgaactggcactactttttactacggctatattctgtccattagctacaaaagtataattagcatctgttgatgcacttggtttcgcatcacttgcaagttctgaaactattggagccccattgcttccatagctataggttcctgtctgagttggatctagtgttaatttaaattgtccaccaaaattctgtgccacattccagccagggttaaagtctaactggattttaaacaactgctctccatttggtccgacttttcctaaatcttcaattgaatagttacttggcgaatattgattagatccattaaattgaccaccaaaataattaccaacatttttgtctattaaactaaaatcagttgtactcgacgtaaaacctttaggaatcattacaataaattgtggattattaactgtagaattaccaagtgtagaaagacgaacagaaagtgttggtatttgtgactgtggcgtattactcgtgtagttaatactattaccagaaacaaaagcaccagatgaatttaaattaccgaaagaagcaactcctgtaaattgaggtaattctacagtgttgttaagactataattaatcgagccttgttgattattaataccagtagagtttttaacaacctcaattgcttgcccatttacattaaaagtatacgagccacctccataggggcttgttccatttgctaccgcataattagatacttcagaaacaaagggagcgccatatacattatacgaaactacaccttttgcatttgcatctaaagttaatttgacttgaccaccaaagttattcccccaagttggtgttgcaccagttaaggtgatcataaatagttgttcaccatttggaccgtaatttcctagttcttttattgtcgatgttccattataaggtcctgcaaatcctccaccactaaagatatcaatgccttggctattagttaaagtagaaaaatcagccgtagtagcagtaaatcccttgggaatcataattataaattgagggttcgtaacggtagagtctccatacgttgataagcgaaatgtataggtaggtacagccccatctttaaagtctgttccattaatattactgccatcagcatttttaatcattactgtaccagaaaaagtaggtttaacaactgtttcatttgttgtagccaaagttacaaaattagcacctaaagcaattggtaattgagaatttgcagtcgaattatttcgttcaattgtattattcgtagctagaggcaaattgacaagagaagagatatttttatttaaatctaaactcgcctgcaatgtagttggaatattattcgaagttgaggtatatgcagaagtaattgtagattcacttacacgtgatggattagctgatctattaatacctgtagaattctctccaacgtttttattactttttaatactgtactatgttcattagaagatagatgggatctatttatcttttgagtattagatcttttttctgttgatttatttttggccagacttagagaattaagtatgctttccgattgactcagtgaatgtgagaaactttgagattgagatacgatatcagaaatactttcagactgacttatagagtcagaaacactttctgaaatttttagactcttagaagtagatgaactttgtgcttccgaattactaatgctattttctttttcagtagatttactatttacttgatttgaaaccccagttttggtactttctgatactgatcccacaatttgagatttaccatctacagaagtttgtgctgcatatacacgatcattgggtaaaatcgcaatgccagttgttccggtacctaaaattgctgctaatgcagcaagttctttaatataggactttgaattatcactctgatcctttaatctattggggtctacatattttttcttttgactatcttttcttttatttttaaaatttttctcttccatgctttttcccaatccatatcataaattacaaaatataaaaaatattaattgagcatataaataacgcattactatacacatctataatatatcttttgtaattaaattaaaacacaagcacttgatattaaggataatcgcttctaagatcagataaaatggttatttatcggcttaagtctatagtcaaaataatgagtattatataaaacaaatcacaacaaagttacctaaaatcctagtattaaagtacaaaaaaatacacgattctataaaattctcctcttatagaatcgtgtatttttaattattaatttttataaaataatcttaatttattaaatcacaaactttttaagagcttttgcaatgccattatgattattatcatcggttacgaaatcagctttttccttaatatcttcaattgcatttcccattgcaatcttcttaaagcttgaattctcaaacatagaaacatcattaccttgatcaccaaagaccatgacatcttcggggctgatctttaaacgttgcgccaaatccattaaagcatttccttttgaagcaccaattccatttagctcaatacagttatctaaactatgaactatatcataagattcaaaggcccaatacggaatagaattccatagtttttcaatttgatcactatcttttgcacaagtaaatcctaccttgttaaaggtaaaatcttgcggaatctctttacgttcacgaactctaatttcattatcagtcaaagcggcattaatttgcatttgtactgaaagatcacgatctaaggtccaaaaacgttcagttgtctcaaaatgtaagttcacatgggcaagtctttgcaagcgaagcattacttcaaagtcacgataattcatctcttgactcatcagaacttttccagacaagtcttgtacaactgcgccgttaaatacaactgcatattcttctggtccttcaagtcctaattgagtttcaaaaggcattaccccagagagaggacgaccagaagcaagaacaattttaactcccatcccatgcgccacttgtaaagttctcaacgtttcaggtgaaattgtatttccactggttagtaaagttccatctaagtctactgcaattagttttaccgccataaattacccctatcttccaaaaatcatatagaaaattacatttattaataatcccattagtgcataaaaggaaactgcattagctttcatttttttctttattaaatacaccagactagcaataaaggccactaagggaaaaacagtataaaaaatgattgcctattcagcaactccataaacatctgtatttaatttatgaatgaattttttctccaacaaaaatagagactaataaattattagtctctattttatattaaccaatataaaattcaatatgctgttttagattttcaaaatcaattggtaaatgaccaccaatctcaccatctaaattcacaggaatcggatccttatctttactctcacctaataattctactttcaaatttttagtcttagtatagataatctgtggatcattaacatgatttccattcaatgccatagccattaaacgtaaaacatctactggatttgcagttttaactacaatcaactgaaatagtccatctgataattgagcatctggcataatccgttcaaatccgccaattgaattggtcattcctaaaagaaacattgataagtctccctcatagactccctcatcataggttaaacgcatcttattgctactgatttttggtagcatttctgcccccttaagcaaatacgcgctataaccaaggacggattttacttctgatggcacaccataagtaagctcggttaacgaaccactagcagcaatattcataaaatattgcttaccggcacgcccaatatccatcttttgtgttttaccagtcaaaattactttagctgcctcaactaaatcatctctgggaatctttaatgcgcgagcaaaatcattggtagttcctgccggaataacagctaattttggtcttttttctaatggagctactccattaactacttcgttaatcgtaccgtctccaccagcaccaactagtaaatcaaaacctgctatggcacatctttttgcctcattttgagcagacaaaggttctggcgtcgttctaaaagcactggcttcaaaaccagcctgttctaatacatttaagatatctgctacattttgaagcatttgctcatgacctgaaacaggattataaatcaatctcgcttttttcgtcatcgcctctcgcctccctaaaatgattaacgactttgaagttccttgttaagcaattggttaacaactttagggttagctttaccacgagtttgtttcatgatttgaccaaccaagaatccaatcgcacgatctttaccattcttaaagtcttcaacagattgtgggttatcatcaacaaccttagttaccattggtccaagaacagaaacgtcagataattgaaccatacccttatcttcaacgtatttcttaggatcagtaccattttcaatagattccttaaatactttctttgcaatcttagatgaaatagtaccatctttgatcatcttgatcatttcggctaagtgttctggagtcaacttaatatctgcaatgccaacttgattttcattcaagtaaccattaacttgagtgtttaaccagttagcagctaaggttggatctgcaccagcagcaactgcagcgtcgtagaaatcacttgattccttagtttgtaaaataacgtctgcgtcgtattccttaataccatattcttcaacgtaacgcttacgacgttcaaatggtgattcaggtaaactttcttcaatttcgtcaatccagctttgcttaatatggtaaggagcaatatctggttctgggaagtaacgatagtctgcgtcgccttccttaacacgttctagaacagttttaccagttgcttcatcaaaacgacgagtagaaagttgaactctaccaccagaaagtaatacttgttgttgacgtttttcttcataagcaagagaacgacgtacgtggtcaaatgagttcaagttcttcatttcaaccttggtaccaagcttttcttgacctgcaggacgaatagaaatgttggtatcaacacgcattgaaccttcttccatcttaacgtcagaagcaccagtgaattgaacaatttgacgtaatttagtcaaatatgcataagcttcttctggatcttccatatcaggttcagaaacaacttcaagaagtggaactccctgacggtttaagtcaacgtatgaataaccgttagcaccgtgcgtattcttaccagcatcttcttcaatgtgcatttcatgaataccaatgcgcttcttcttaccacgaacttcaatttcaatataaccatcacgagcaagtggttggaagaattgagtaatctgataagctttagggttatctgggtagaaatagttcttacggtcaaagtgagttactggtaaaacatgtgaatgagttgccaaagcaaccataataccaagacggtaaacgtccttgtttaaacgaggtaagacaccaggcatagcccagtcgataacattagtttcagtgtttgcttcagcaccataactaactggtgatggagaaaaaatcttactctttgtttttaattcgaagtggacttctagaccaatagtcgatttaaaattcattaattaatcctccattcctgtaggtgttttttcgtagaatttattattacgttcaatgaaatcagcaactttaaatacatttccttcatcaaaacgcttagccataatttgaagaccagcaggcataccatcaactaagcctgcaggcacgctagctgctggaataccagctaagttagctgaaatagttaaaagatcattattgtacatcttaattggatcagaaatttcttcaccaataccaaatgctggctcagtagtagttggtccaacaataacatcgttttcttcaaaaatcttttcaaagtcgcggcaaattaatgttctaacttgtgcagccttcttgaagaattcatcatatgcaccagctgataaagcaaaagaaccaagcataatacgacgcttaacttcgtcaccaaagccttcacttcttgattttacataaacatctaataagttcttagtgtcctttgcacggtagccatagcgaataccatcatatctttgaaggtttgaagaagcttcactagaagcaacaatgtaataagtaggaacaacatacttagtatgtggcaatgaaacttcgttaataattgcaccagcatccttcaaaacatcgatttgtttttggataacttcgcgcatttcaccgtcaacagcatccatgtattccttaggaacagccacacgtaagcctttaacatcttggcctaagaagctagtgtaatcaggtacttcttgttcagaaacagttgcatcatgttcatcaggaccagcaattacgtttaatacttcagctgaatccttaacacgcttactcattacaccaatttgatccaatgaagaaccaaaagcaataagtccccaacgtgatactctaccgtaggttggcttaataccaaaaataccattgaaggcagctggttgacgaatagaaccaccagtatctgatccaagagctgcaacaacttcaccactcgcaactgcagctgcagaaccaccggatgaaccaccaggaactttatctaagttccatgggttatgtgtttcaccatagtaagaatgttcagtggatgaacccattgcaaattcatccatgttagtcttaccaacaaaagttgcttgtgccttctttaatttgctaattacagtagcatcataaacgggcatatagttgtaaagaatgtggctagctgctgtagtcttcataccattagtaatgatattatccttgatagcaataggaataccagctaatttatttttattaaaatctaaattttctgctggctttgcttcttcatcaacagtaatccaggcattaatctttttgtctgtttctttaatgtttttaactgtttccttagctaggtcttcagctgttatttcgccatcttgtaattttttatttaatgagtcaatgttttcatttaagtaattcattattcattatcatccttatcaataattactggcaccttaatgaagccatcagctttttcaggaacattcttcattaattctgcgcgactttcccaatgttcaggcttgtcttctctaaagtcagtctctcgatcaacaacttgaacagtttcaggaactccttcagtatcaacttcggctaattgatgtgccatattgataatgtcacccatttgttcagtaaacttatcaatttcgtcttcaccaaactcaagtcgagatagtgctgcaacgtgattgatttcatcttttgtaattttcaccgtttgcctcctattcaccgccaaagacgtggacataataactatcgtctgcggaattcttagcgattaatgcctgcgtatcattaacagaattaatcttaatttctattggtgcatccttaggtaagtacttcttagcagctgacaatacaagtcttgaaaaactctcaatctgcgcataaccaaagaattgggtagttacagtaatgttcatttgtgtcaaagttttattttgataatgaacagtcgctgttaccccactaatattagggaagtaaccttgaatagctgctttaaaatcactaaatgaagctgcatcagtagaattgattgctttttcacttccaacagtcggtagcacttgactacgattattgactgttttccaatcatttattttactactatttgcattagcaattccatatgcaaagtaatttccacctacaagagaatctttactggttttactaaaaagtccaaccaaaattgggatatcttttaatcccttctttttacgtaaatacgaaactaacttattagctgcttctttaccaaaagtctcctgttctgcacgagaaatatctttatgatattggggaccatctttaactttttggtagtaatcaaccgagttaagagctagcccaatactcataccatccattttgtaactagaattagatttagtcaaaaaatcttgttctaaaatttgatctaaaataataggattatacgaattctttttattacttttttccgcatttagaccttctggattacttttagactttcttcctagccaatcagtagcatcagcaaccgaaattttttgtccttcttgaaaaacatacttactacttgaaaaagtattgtgagataaatcaattaacccagattctaaagcacgactatctacattattatcactagtattttcagttgttccttctattggactagttacatactctccatcttttaaaagaacattatacccatttttactagtactggtagtttgataactttttttctttgttgtagaagtagtagggttattggcaagatcagaattttttaaattgccacatgcacttaaacttaacccagttgctagtagtagtgctatttgcaaaaatcttttcaatttatttttccttcttattctttatttttcaatttttgcaattgcttcttgttcagttaacattggaacttgaagtttttcagccttatcttttttagagcccgcatctgctccgtagatcaaataatctgtcttcttagaaactgacccagtgacttttgcaccaagatcctgaagcttcttagtaaattcacttcgagtaaaggcagataattttccagttagaactactgtcttttccttaaagaaattatctggtgcttcttcttcaactgttcctaaatattccatatttaatccgctgtcacgcaattcttgtagtagtttctgtgcgcttggttgattaaaatatgctgttaatgactccgcaatcgtctctcctattgtatcgatacttgttaattctggcactgttaattgactaaccttttccaaatttttatatttttccaaaattaatctagccgccttagcaccaacatgatcaattcctaagccgtacagtaataattcagcagagttttgcttactattttcaatagaagacaataaattagtaattgatttttccttaaagtgatcgagttgtcctagttggtccggagttaattgatataagtcagctacatcattaataaatcccttatcaattaactgtttaacaattctaggaccaagtcccataatattcatcgctccacgtgaagcaaaatgaataattccttcttcaatttgagctggacacatcggattaatacagcgaagcgctacttcatcttgcaagtgaaccaaagtttctccacatgaaggacaaacatttggaatctcatacggcttactatctttaggtcttttgcttaaaacaacactagaaatttctggaataatatctccagctttatgcaatttaactgtatcgccaattcttacgcccttttctcttaggtagtctggattatgtaaagacgcacgagagacaatcgttccagcaagtttaactggatccatcactgcggttggtgttactactcccgttcggccaactgtccattcaatatttctaactacagtctcttgctcttctggtggaaacttataggcaatttcccagcgaggtacttttacagtattacccagttcattttgtaaacttaagtcgtcaacttttaaaacaataccatcaattccataacttaaatcattacgtttagcggtatattcatcaataaacttaaatacttcgtccattgattcaaaacgtcgtccagactgattagtatgaaatcctaatcgattcatttcatcaatcgcttgatgttgacttgtaatgtttcttggtggattaacccaagtataaataaaagtacttaaatttctttttttagtaattcgagcatctaattgtcttaaagaaccagcagcagcatttcgaggattagcaaaaacttgctctcctttttcatcacgttctgcatttaaggttgcaaatgcttctttctccatgtagcattcaccacgaacctcagttgttaaaggttcaggtaatgtttgaggaatatctttaataaatttggcattagctgttacatcttcaccaacacggccatttcctcttgtagaagcacgtgttaattttccatcagtatattctaaggataaagataatccatcaatttttaattccacattataagctactgagtgacccactaatttcgtaattctttcgtcaaattctttaagctcatcttttgagaaaacatcccccattgaaagcatcggaacgggatgttcaactttagaaagatcgcttttaatctctccaccaactcgttgggtaattgaatcggcagttactaagtcaggaaattgctcttctaattctactaattcctgataggtcttatcatatactgcatcttcaactaccggagcatcttttgcataataatcatctgcccatttatcgagcttttttcttaattcatcgactttctgagaagcctcattatgagttaaaactgccattatattagcccctctctaaatcaaactgttctatttcattatatctttttaatcggtgcaaaggcagctaaaaggcgtttcactccttggctagcaaaggcaatatctaattccatatcttcaccagtaccgttaactttgactacaacgccttttccccatgctttatgtgtaacttgatcaccaacattccaggactttttctcagctccaactgcaccagttgctttcttagcctcctcaattgtcatctttggagggtaaacatgagagttagcttgtttctttctattaatagcaaagggaacagagatgacagaattagatggcattgggttaacaaattctaaatccttatcttcaatctcatcaataaagcgtgatggttgattacgttgcggacggccatacatcattctagaaaaagcattggttatgtagagtttcttttcagctcgtgtaattcctacatatgctagtcgacgttcttcttcaagttcacttggatcttctactgctcttgaaagtgggaagagtccctcttccattccaaccaagaagaccactggaaactctagtcccttagcggcatgaagagtcatcaatgcaacttggttatcttgattttctaaatcatcttgatcacttaataatgagatctctgaaataaaatcacctaaagctgttgaatcttcatcttcgggctcataattatcatcaaaacgcttagtaacagtcagaaattcatttaagttttctaatctagtatctgcttcaattgtgtgttcattttctaaagcttctttgtagccgaaatcagctaatattttttccgttaaacctgttacaccatgcgtcttactatattcgattgcatcttttaaggccgttccaaaagtagctagcgttctagctgggcgacccgtaattggtgctaagctcaaattcttgaaagtctcttctactgtaaagtcattatcattagcaaaaccgttaaacttagccatcgtagttggccccaaaccacgttttggtacattaataattcggttgaaactcattgaatcagcaggatttgcgacaacttttaaataagccaaaatatctttaatttcttttcggtcgtagaacttatgtcctccaacaatccgatacggaatattagctttaactagggcttcttcgacgttacgtgattgagcatttgtccgataaagaacggcaaaatccttgtagtctctttgatgtttttttatttcttctttaatctttgaaatgataaacagtgcttcatcatttccactctgagcacggtaataattgattttatcgccagcgcctttatccgtccaaagtttcttaggtttacgtttcagattatttttaattactgagttagctgcatcaagaatatggccagtagaacggtagttttgctctaatttaatagtagtaacttcatcatcttgatagtcatgctcaaaattaagaatattttccatgttagctccgcgccaaccatagatcgactgatctgcatccccaacaacgcaaatatttttatattgagcagctaaagcaacacaaagttgatactgtgcttcatttgtatcctgatactcgtctactaaaatatagcggaatttattttgataataatgcaaagtttctttatcctttttaaataagacgagcgtttgcataattaaatcatcaaaatccataatttgatcacgctttaagcgatgctgatattcgctatatacttgcgctgttaccttttcaaacggactagctgcttgctccttaaagtcttttggagtaagtaagtcattttttccattcgaaatagcgcctaaaattgcttttggatcgtacattttaggattaatattaagatccttttcaattcgtttaattagtgtcaattgttctgcagaatcagcaattgaaaaattattagagtagccaattttttttgcgtctcgccgtaaaatacggacacataaagcatgaaaagttgacatccaaacactgtcagctgctggtcctaataacttttggacacgttctttcatttcgctagctgccttattagtaaaagtaatggctaaaacattccatggcgcaacgcccttttcttcaattaaataggcaattcgacgtgttaaaactgatgtttttccactaccagctccggcaactactaaaagtggaccttcagtacactgcacggcttttttttgctgaggatttaatcctgcaagaattgtttcttcgctcattgcttcttccttttctgttaactcaaacgctaaaatagacttgtctattataacaaaaaacgacaatagcatttacttaactattgtcgtttttaatttaatcatattgtgttaaattgaattctttaattatatcaattaatttttttgcataacctggatctgtcgcatatccatctgtttctaatgcttgtgcttgagtggcataatctttggcagctaaaacatgctgatattggtttctattccaagtagttccattcacaaataggcttgtatgtgcctcgattgattcttcataagtatcgtaaactcgaaaacgccccgtaacagtttcccaatgatcattaacaaactcagaggtcgttaactcgcgacttgtattcggatccattcccttaacgccaaataaattattgtattttctagaaagctcactctgaccaaaattgctttctagacaggcttgcgcgattgtaacacttggaaagagtccataaggcttgtcagtcctttgggcaattggagccactactttaataaacttttctttactttgaagagactgttctttttctagttgtgcctgacgtaatcgttcattattcacagtttgctgacgccagtacaaaaagcctgataaaattattaccaaagtaaaacaaatcgcaaatgctcttgcaattatatactgaatatttttttgacggcgtctacgcgacattttaactcatcttccttttcatcacttgcttcaaaggcatcgcaattgccggcgtaagaacagcagtaaagattgcttctacaataccattaatgcctaaaacgctaattaaaatagcaattaaaggagctgaattttgagtttgacctaatgaatgaagtaaaacagagggatccttcatgtaccaaagactagtaataccaaccacaagtagcgtattagtcaaagaagtacataatcccgtgattgtataaacaacagtcttttgaaattttgaatcatcctttgccgcttgtccaatcattcctgcgataaaacccgcagctgtccgaggaactaaagcaataagaatgtttcggaataaaagcatgctgacaatgtcaccgggctgtgtatatgcaacaaacatgctcaataagccccaaaataaaccaattgatgctccaaaacctggtcccattaaacatccggccaatgcaactgttaaaggaatagttgtaatagagggtaatcctggcaaaatccggatgtagccaatataagggacaaaggtctgaactaaaataattgcaacaaaaatagcactgatggcaattctaaaagtcttcttactaatcatagtctttcctactttattaatttataactttaacaaaaaaggaagccgcaatttgcgacttccttttcttagtggtgcgggcgagaagactcgaacttccacgatctaaaagcgatcacaagatccttagtcttgcgcgtctgccattccgccacgcccgcggtacttaaataatataccagataatttttcttttagcaaatgaaaattcaaattttttatttattttttctgattaatgttaatcttccgccgcatttgccacatctatatttttttgtatttactttacgaacgcgaggatactgaaaatgacaatttttacattcataaatataatttcgattttgtcgacgtcgtaaaccaatatcaggcgtataacgactacctccaacagcagcaagcaaattcttaaaatcacgattacgatgctgataaccgcgacccgctaaatgtaagtgataatgcgttaactcatgcttaattattccaactaaagctgcataatattttttatctaaaaaatgaccgttaatatcaatatgatgatcctttaaaaagtatcttccgcccgtcgttgtcattcgattattaattttaacctcatgtttaaacggaatatgaaaatactgtaaagaaatttcttctactaaattttgtaactctgcttgattcattattttcgtattaatttttgatatattccagcttgttttggagaagatatccttctctttaaatcagtcacaattctttgcttcaaagactgctttccatctatccatgttccagtaaataagtgaatagaatatgaattcttgcttggattacacaaaaatccatccggataaacgtggagaccatcttttaatatttgttctctattgcctatttttagaccgtaattttcttttaaaatatcagttactgaaatactattcacacctgccatttgatcattcttatcaaaagtaaaatctcgattattgtaataattaagaatatccttcataaaaggatgattcatttcagcgccaaaaatagctgctgacaagtaatcattgttttcaaaaccaataaatgcacgattatttaaaagtggatctaatttcttaaggactctaacgtctgtatctaagtaaatgccaccttgctcataaatcacacgggctctaatatagtcagaaacaaatgcccactttttggcctcataggcttgttcaatatacttattttcatgtacgttgaaattattttcattccattcaacaatttcatagtctggcaatttatttttccaggtggcaatgcattcttcaattaaagatgatttagggttatttcctacccaaatataatggatttttttaggaatcatttttgtcttttaatctttccgctgattgtaaaattaaattgaacacttgataaaaaataaaaagtccattcggacctgtttgatagaatgttaataaccacaaaaactttctattggaggtcaaaatggactctttacattctaccatgaaccagcacgttaaaggcaagcatttatcatttgaagagcgagttattattcaattgcgtttgaaagatggctattctttgcgtgcaattgcccgtgaacttaactgttctccttctactatcagctatgaggttaagcgtggcactgtaaaactgtatcatggtaaagtcaaaaaatataaggctactcaagggcatgatgcatataaagctcatcgtaaaaattgtgggcgcaaatcagactttctcaggaaagctcaattcatgcgctatgtccacaagcatttttttaaagatggctggtcgcttgatgtgtgcagtaatcgtgctactgctgttggcgaattcgctagcagcgatgttgtctgcaccaaaactctttataattacgttgatcaaggcttattaggaatttataattacgacttgccagagaagcttaaacgcaatactaagcttcatcgtattcgcaaaaataagaaaaaacttggcagaagcattgaagaacgtcctaaagagatcaataaacgtaatgaattcggtcattgggaatgcgatttagttctcggacataagagcaaagatgatgaggtactgctaaccttatctgagcgtatgagtcgtgagtttttaattcttcgtattcctgacaagacttctgtcagtgtcatgcaggcctttaaagaactccaaaggcaatacagcgaacattggaatgatatttttaaaaccattaccactgataatggctcagagtttgcagatctttccaacctagaaaaagtatccaatacactggtttactatgcccatccttacacttcttgtgataagggaacagttgaaagacacaatggtcttattcgcagattcattcctaagggagaagcaatagctaactattctttacaagacatcattaatattgaaacctggtgcaattctttgccaagaaagatactggcctatcatacaccagatgaaatctttgaaagagaattagatctaatctatcaagcagcttaactaaaagtgttcaatttattattgcaatttgctcttttaatctttctagaaaagcgagtaacaaattcaatcatatcttgattaaaatctaacttcatcataaacataattgccgcataaattactagcatcaaaattgacttaactgccatatttaaaaaactcgaggtaattaaatttggcattaacataccagcaattaaggtaattattccaattaagaaatatttcggtacatcacagaaggcatctttaaaattatagtcatctctaacaatccaaagtcgtaaaattaacactacaaattctgtaattaaaattgctactgtagcaccgctggctccatatggtcgatctagtatagctgctaaaactaattcaattatggccccaattacaactggaatcgcgtattctttatctcttcgattagcaagtgcaaattgattagcaaagaccccacccatcggaatcataataatggttagggcaaagaagaacatcagagatgtcatcggaataaactgttttccaaagaagaaaggtacaaactgcttagtatttgccatgatgattacagcaaataaggttcctagcattgtagtcgcttcaagagacttctttaaaactaccttttgggtctctttttcttcactagccatcttcggcataattaccaaggaaatgcttgtaattacccccaataccatatttgaaattcgctgtgaattatcataaaaagccacctgagttgaattgctgaagaatcctaaaattggcttatcaagagaagtatagatctgtgtagcaatctgaggaatcattaaggtgataatcgaaataatggtggtcttatatttatagaaatgtcctactggtcttcctacataacgatgaatatcaagccaaaatacaaaagatcctagcatggttgaaactgacataatcaggaagtatttccaaagatctgcaggtgatttaattaagagcaaaatcaaaactacactggctaatttaacaatcgtattttttaatacaactctaccaaaatcagccaatccttgaaaaaaccaagaaatatcaacttgagctgagatcaaatatggaaccattaagattaaatagttccaatattgaacatgaaaaatattcgtaattaataaagtgattaaaatagtcactaaacctgcaattgcttgaaaataccacaatccccaaaaagcttcagttaattcttgaggggtaccataagctctagtccgagatactgtcctaataccaatataagagactgataaagtacaaaataccatcaaaaattgcacagtattatttacactgccataaataccataagtcttaggccctaacactcttgataagtatggaacggtgatcagcggtactaaaactagaaaaatttgatagaccgcattatataaaatattaagaaaagttcgcttcactactttttcctctaaaaattcttcgtcatgtaatcaaagataggctcgcaagaatcaatatcttcaacttcatcaattaattcacgccaataaaaacgctgatttttgtattgcttatcatcaggatgtctcaaaacttgcagaagttctttttgtgagttaacacagggtcccggtgtaacatcttcgtaggggcttaataataaaccgcgtactttttcatattgctttagataattagtaataaaaataattggtttatccaaatacaagtaatcaaaataaattgatgaaaagtcagttattaagaaatcagtatctccaagcaattcatataaatcaaggttattttcaaaaagataatcattatttaaaaaagcaacatttgaaaactgactattaaagttatcaaacattcgcatttcatagggatgaagtttcacaatcaagtattggtgattatcctttaaggcatcatttaactcataagggtcaaagcctaaaaaagcaaagaaattaccttgttttatcatttccataacacttggatcctcaagctcgtagcggaaagttggcatataaattccgattttagcttgctcatccttagttttaaataaatcctctaataatttttctttagaaattgctggttgatcaatataatcaattcgaggaaagcccagcttttgatattttttcccctcaattgccatacatgcgctcattaaagtttcgtataaatctgagcttgatgttaccatatcagcatttttatgccaaagcttttgatttcgtttattagcacgatagcgtgtattatgtgccataaatcccatccgctttagcggaacaccgtgccagaattgaatattaatttgtgcgcggcgtgctttaaaaggttggtgcgtagtaatcacatacttggctgcaccaatctttttccacgtttcccaagacaaatgtgacgatggccacggttcaactaaggttacgtcataatccggatgattagctttaatgtatttatagaataaataaccgtttgagccggatctacccgatccgtttagaacaacaatatttttttctttaattggacgaaaactcgctagcaagctcatcccccataagtacaagcgaaaaaataaactcttcattagatattccccagtaacgtacacatatattatgtgttgatttttttattttattctttactaagggtataaaaaaagcctgagtaaactcaagctttttttgattatttgataaaactttactttcttcaacctattaatattttttccttttatagctattacttctcattgaagtttcatataattcatattagagatacttttatataggagagtgcaacatgaatattggggaagcattaaaacaatatcgtaccagtgcaggcctaactcagaaagaatttactcaaaatatcctttcgccagcacattactcaaaaatagaacgtaatttacatgaaatttccgcaaatgatcttcttaaacttttaaaccaaaataaaatacgatattcagattttttctcctctcttaaccaaaatagtatagaagaacaagataaaaaaattagtgatcaattgctgtctgcttactacgatagagatgttgataaagccaaagaaatttatactcaaattagtacatccgataatgatttactcaagttacgagctgaattgatccttgataccttgcaaggaggtcgtcgtaaactttctaacaataaagataaaattctgcaaaaggtcttttcaggcaatcactggaatagtgattctagtaaaattctgatattagctaattttattgaggtttttgatcctcttgatttaccttttttcttaaatcaaatttataaaaaatatcaaaacaatcttgcccaacaacctcttaaaattcaagaaagtgttgcaactttttgtattaattacttatattccgcatcccaaaataaacatattagttcaattgataaggctattcatttattaactcaattaacagaatctcctgaactaggtattgaaaaaattttaggttattactatcactgctactttactaatcagaaagatcaattagaaataattactaaacttttaaagcaaagtaatttaagtaaaataatagatattttacctcaataaactgcatatacgcattttgttaatcaattatgcagaaataatctcttcattacataaattctttatcatttgtctcatcttaaatgaaaagaggatcaacaatgaagaaatttatcaacaaaaaatattttaccttaagtatcttgcttgcatgcttaagtggcttagagttacccttcggaacttggtcatattcagagattttcgctctaattaccgaaaaaaatattcctaatactatcaagatgataacaattattactgctgctcaagttcttttggttgttatcaaatatttaaatacaaggatgctcaatagaaatattgcttgttttaatcaaaatgtgcgtgaatatctaatgaaaagtaactttattgaaattagtgaaaataatgtgtcaaaacaaatttcttttttatcaaatgatcttaatttaatagaagaaaattattttaagcagctttttcaattgatttctatgattgtaacaattatcggaactttaataattgcaatcggcaatagttttctattaactttagtttttatttcatttgctattttttcaagtattattcctaagtttttcagcaaaaaaacagcccaacaatcaaataattggagtacttctactggaacttacataacatttatgtctgattttctaaaaaacattagaacagttttaaattataatgccttagatacatttattaaaaaaggacaaaaaattattactcaatctactgaaaataaaagattacgtgataatacaattgccaaaagtaatttttgggttaatatattcgtttattcttttagctttttacctattggagtaggaataattatggtcatcaaagggatgctcactctagcctcatttgtggcagttcaatattccagtacttggattattaacagtttttacagtattaatagctgccgtaatcaaatgtcttcggcaaaacccatgatagataagctgaactcctttaaaccagaaaaatttaatacagatgtttctaattctaacctagatacactaatacttaacaatattagttttggatataaggcagaagaattagttttagacaaagtcaatttagaaattaaaaaaggcgataagctattacttaccggtaaatctggtcagggaaagtctactctccttaatcttttaactggtcgactaaaacctactaacggaaatattcttatcaatggattatctaataaaagttttacatttagtgaggtacaacagacttctcaaatatttaatgatactttgcttttcaacctaactttaggtaaaaagtttagtgattccaaaattgcagaagctatcaaaaaggccggattattgccatatgttaagcggtatggattaaatgcaattatagaagaaaatgggaagaacttatctggtggtgaaaagaaaagaatagagttagcacgagcttttttatatgaaagagattttttaatcgttgatgaaggaacagcttcgcttgatcccactacagccaatcagatacatgaaatgtttttgaattctccactaactgtggttgaaattgatcatcacattccacccaaaatcatgcacctctttaatcaccattatgaattacacaaccaacaattagaacgtatattttaatttgtaaaaaagacaactagttaacattttagctagttgtctttttacacatatattttactatttaaattctagaaaataatattcatcactttctagcagcttttctttcaaagaatttaacaatttcgacaataattatcatcaaaaatccagcaacaataactacaagccattgcatcccatctaactcagttacatcaaaaatcttagttaaaaatggaatttctactgccgccataactaaggcagaaataagaattgctccattaaaccacttattctcaaatgtttgtgctctaaagattgatttatgaataaatttagagttaaaggcatggaataattggattaatcctaaggtaaggaaggccatcgttaaggcatctgcgtgttgcatagctgcacttccaacatgtggaccaacatgtaaaccaagttgatatgcacctaagaccaaaataccctctaagataccttgataaataatcgagcttgcaacgcctccactgaagaagtttgactttctaccacgtggcttattcttcataatacctggctcaacaggttcaacacctaaagcgatagctggcaaagtatcagtaactaagttaatccacaacaattgcactggcattaagatatcccaaccaagcattgtcatcataaagacagttaaaacttcaccaacgttacaactcatcagataaagaattgccttttggatattagcaaataccttacgtccttgtttaatagcttcaacaattgtcgcaaagttatcatctgccaaaaccatatcagctgcaccttttgaaacttcagtaccagtaattcccataccaataccgatatcagcttgttttagactaggtgcatcgttaacaccatccccagtcatagcaacaatcttattatttgcttgccaggctttaacaattctaaccttgttttctggtgaaacacgagcatagacactgtagtcttgaacatgctcattgaagtactcgtcagaaagtttatcaagttctgcaccagtaattacagccttatttttatctggactttcttctaaaatgcctaaacgagatgcaattgcagcagctgtaatttgatggtcaccagtaatcattactgttctaataccggcactttttgcttcggcaacagcagcttttgcttctggtctttctgggtcaatcattcctactaaaccagcaaagattagatcttgctcaacattattagtcgttggatcatcataagctttatctacaatcttgtaagccagtcctaatacacgtaaagcttgttcagccatccctttatttgatgcaagaattgtttctttttcattatctgaaattggcgttacttgaccatctttttcaatttttgttactcgctttaataattcatctggcgctccctttacagccacaaagaacttatcgccataatggttaaccgtagacattaattttctttctgaatcaaatggaacttcttgaacgcggctgtctttcttaagaagatcttcaactttaatattttgatcaaaagcatattgaatcaaggctgtttcagttgggtcccctaaaagccgaccaccatcttcaatctttgtgtcattagctaatatcatcgacatcatagccggattatcactattaattggtgcttcatcattatgaagttcgccgttatagtaaattttttcaacagtcatttggttctgtgtcaaagtaccagtcttatcagaacaaataatatcggtagctcctaaggtctcaacagctggcaattttctaacgattgccttatgcttagccattgtttgtgttcctaaagccaaaataatagttacaatagctggtaatccttctgggattgcagctacagctaaagaaacagccactagaaacatatcgataattaatttattagtcggctcgcttccctgtttggtaaacattccgacgataaagacaatcacacaaattgccaaaatcataatcgttaaagtcttaccaagctgattcaagttttcctttaatggagtagctgtttcatctgcattattaagcattgtagcaatcttaccaacttcggtattcataccagtgccaacaacaataccttctgctcgtccgtaagttacattagtatttgcgtaagccatgttaacacggtcacctagtgctacatcatcagcttttaacacgtcactatccttttcaacaggtactgactcacctgtcaaagctgactcttcaacttttaaacttgcagtcttagctagccgcatatcagctggaacaacgtcccctgcttcaagcaagacaatatcaccaggcacaatatctgtacttggaatttctaaaattgcacctccacgtcttacatgggcatttggtgttgacatctcctttaaagcatcaatcgcagcttctgatctagcttcctgaattactcctaaaattgcattcagcaaaacaacaatcataataattgcagcatcagtccattcattagcaactacaccagataaaatggcagccacaattaagacaataatcataaagtccttaaattgatcgataaagcgcataaacatactacgctttttctttgatgctaaagaattgggcccatctgaagctaatctcttcttagcctcattatcagacaacccattgtctaacgatgtgttcagctctttctcaatttgagaaatctcttgagcatagtatttctctttcaccgtaaaacatcctcccataaacaaaaaagacctatgaccagttatcagtcataagtctcactaattaagataagtccagagatatccatctcggttgttgaacttatcgcaataacttgccgttactctcttatgcatctatagtatattaaactatctagtccgatacaagtttagttctttttacataaatcatcaaaaatagtagttaaaatttataaaattaaagtctaacagcatctaaatcggcatcagtaatatttatcaagtcttcctctgaataactatcagtcagggctacgcgtactgcttgtttctttataatcttatcatttaaatttctgacccaacgcccattactgttatcgttatccttacttaaattattcttcaataagtctgcataacttgaaggatttacatgatattgttgtttctttagagaaaacaatccaatttgaaccatttcatcaactgtataatcttcaaaatcaaatttattcggaatacgactacgtaatcctgggtttgtttctaaaaacttctccatatcgttagtataaccagcaaagataatcataatattagagcgatgatcttccataaactttaatatttcatcaattgcttctttaccgaaatcattctgaccaccactagctaaggtatatgcttcatcaacaaacaagatcccacctaaagctgattcaagaacttttctagttttttcagctgtttgaccaacatatcctgctactaaatcagctcgagatgtctcaattaatttatcttcagctattacgcctttttcatatagaacatggccaacaatacgagcaactgttgtttttccagttcctggatttcctaaaaacaatgagtgcaacgtttgagaactagtatttaaacctttctcttcacgttttttatttaaaacagtgactgcaataaattctttaacttgttgctttaccgtttctagaccgatcatttcatcaagctgctgcatacctgatttttgaggacctttttgtagatccttttggtctttttctgctttatttgcctgcttagagttagattcttttttctgggtagtaaagtactcaatatcgttttgtaaattatcttttactattgtgtattgattattttcatccaaatcatactcatcattagtagaatcaaatttcaatacataaacttcagggacattaaaagttacattatcttcaattttaatattaggtgaactttcaaaagctagaccaatccagtctagctttatattactttcacctttagcaaaaatgttaattttcccattatctctaccatcaagtaaaagagtttctccagttaaagcactatgatcttctataataattgactcaacaattctacttgtatttcctacatctatcttactttgattatagagatataaagaatcaattattgaattttctacttttgcctgagcagctttttgtaaataaagggccccagaataattaggttctttaataattgaagaggtaatattgagaatagattcactactaaaaatgcaaggataatctttttcttttactccacccgttacagttacattctgtaatgtagcaacagtattcgaatataaactaaggacattactttcaccatagctaagcgtagtattctgaagagttaaatttgcttcagtagcagtaattttacaattaagagtactattctttatctctacattccctttttcaacataaattctatgtgcaccgtcaccaagtttatcctttttaacgtacaaatcatcaaattgagcagtagcaccatcatctacataaataattggataattttgaccagtcgtagcgtcattaacgaccgaaacatgtgtcgcaattaattgactgttatttgttacttgaagacaattattcttatcttgatagtgtctcagagtcagattatttaattttacctgggcgccatttttaatgataaagccgcctaaaataaaagtattatcttcaccagaaatatttagactcttgttaattacataattttgatcctcaagtggaaactgataatctcttttaatcagaatattgtccccatctgaagcttgatttaatgcatcttcaaattcccaggtagtacgctgctttttgaaaaaacctcgatcatctggtccaactacaaaaaacgtcatatttcctccaagaaaaatacttaactaattttgcttatagaaatcatcaaaaatagttactggcaaatgacgcttatgttcactctttttccacaacttttcaatctgttcagctgcttcttcactcacatctttaccttctaagtaatcgtcaacatctttgtaagttactcctaatgctacttcatcaggtaagtctggacgatcttcttctaaatcagcagttggtgccttttcatataagtgcttaggacatccaagttccttaagcattgccttgccttgacgcttatctagtctaaataatggggtaatatcagcagcaccgtcaccatatttagtgtaaaaaccagagaagttttctgccgcatgatcagtacctacaacagctccattattggcaccagcaattgcatattgaactaccattctttgacgagctttgatatttcctttattaaagtcagtaattttttgaccagttgcttcaactacttttaccattgcatcaactggttctttaatattaacaattagatcttgatcaggcttttgaaaagcaattgcatcggcggcatcacttgcatctgcttgaacgccataaggtagacgaacagcaataaactggtaagacttattcccagtttcttcacgcatttcttcaattgccatttggcagagtttaccagttaaagttgaatcttgaccaccagagatccctaaaacataagtcttcaaaaaaggattttccttcaaataatcttttaaaaagtcaatagactttctaatttcttttttagggtcaatttctggtaacacatgttcatacgcaacaattttttcttgtaatggacgcatcttaatatcctcttttcacaattcgactacgaatatcattaattaagctcatcttgttatcatatagcttttgggataagtccactggataatcttgtggattcaaactacgtttatattcgtcccataatccgtctaagttattagctgcgaattcttttgtttctttaagagtaggttctttataaacaagttttccttcatggaaaatttcttgtagtaaaggacgagcagtataatcagtaacgaccttattaatgtaagtgtattgcggatggaacataaaaagcgcatcaaattttcttggatcttcatcatagcgtgatacccaatcaccctcatttttcttctcagagtttgcttgaatccgccatacctgctttttacctggagtagatactttttcagcatttgaagaaattttcaaagtatcgcgcatcttgccttctttatcttcaattgctactaacttatataccccacctagagcaggttgatcaaaggctgtaattaatttagtaccgattccccaaacatcaatttttgcaccttgcatcttaaggttttgaatagtcttttcatctaaatcatttgaagcataaatttttgcatccgggaaaccagcatcatctaattgcttacgcactttcttagagatataagccatatcgcctgagtcaattcgaaccccttggaaattaatcttgtcgcccatttctttagcaactttaatagcagttggcacaccacttcttaaagtgtcataggtatcaactaagaatacacagtccttatgagtctcagcatatgctttaaaagcatcatattcattattaaatgcttcaaccaaagagtgagcatgagtaccagcgacaggaatatcgaataattttcctgctctaacattactagtagcgtcaaagccaccaatgtatgctgcccgtgttccccaaatagctgcatcggtttcttgtgcacgacgtgagccaaattccattaaaccatcattaccaacagcgaccttaattctagccgccttagtagcaatcaaagtttggaaattaataatgtttaaaattgcagtttcaactaattgtgcttgagctaacggtccttcaacctgcataatcggttcattggcaaaaactaattcaccttctcgagcacttcgaatggttaacctcaattctaaattacgtaaataatcgataaagtcatcatcgtagtcacaagtttccttgagatactctaaatcactttcattaaaacgaagattatttaggtattgaataacatgacttaaaccagcattaactgcgtagccattgccaaaaggttcttttctaaagaacacttcaaatacagaatttctttcacttattccctttttaaaataggtatacatcatattaatttcatacaaatcagtatgtaaaattaatgaatcatcttgatcaacttgtgggtaaaacattttgtcccctcatcactaaaataaataatttttttcttgtattttattataatcaaacaagagcagatatcaaaaagagacatcaaatttgatgcctctttttgatattttaattacttattattcttacataatccctaattgtaaaaaaatctaggatctgttctaactttttctgatcatcttttttaattttgtaaatagtagttccttgactaattattttcattaaatcgtaataaaactgatctaacatattttttgacaacttattactaaactcatcaatttctgttccccaatatatttttgtacctttgggaataacaatttttgcagttttttgagggtcaaaattattgctaaaatcaacaattgttttcaaatatacattatccaattcagaatctttaatatttttaacaactagaggcgtgatttcctttaaagaagtttggccttgtttaaaaattgatggatataaagaagcaatatgaagccgattaattaaattgtataaagtcgcttgtgtggaataggccggcacatttatccggcttacaatatgatgcaaagtcctcaaatttgtagataattcaaataaagttttagaattattttgttttagagaattatcacctaaatttacttttttggaaacccgatattttaatccaacaaaattaccatttactactcttaatcctaaattattttctgcattataccaaacgggcatcccattaattaaataattttcatatacgctggtctcaaatgtctctcttcgccaaaaagcataattagtataaatattttttccaagtcccagggcggtttttattagactaacttcgtttcgataataaggtctaactaaatgaaatttaccatcttttaagcgctgatacatagctctaattccaacaaacattccgtcacatttttcaccaagaatcgtgctaacagcacggtaaaaaacattttgattgaatagaattttatcggcatctaaaacaaaaattatttctccactcgcatacttcagtccgtgtctaatagccttaaaataattatgatgagtttgcttagtatatttaagaggtagttttgtatttcctaagtatcgtcttaaaatttcttctgtttcgtcctgtgatccatcattaattaaaataatctcccaattttgataggtttgattttttattgattctagggcttcaacaatcgtctttgcgctgttataagccgggatgaggacagaaatttttacttgtttcttccctaaactaatatttccaaagatattaacaatagataaagacaaaataaagattaaaactaaataactcgtattaagcacatttgactcagcaacaagcatacttatttcgttaataattaaaaatattattatcccgacaattagatgactagtaggccttaaatgacccttaactttcaaataaaatattgatccaattatttctattaataagatgattgaaccaatactccaagaaagattttttaaaacaaaatcaggcaattcaggtacataccaaactagagaaataagtagaacaatcaagtaaacacacaataaaaaaggacgtaattgttcactaaaagtaaccacaactctaatcagataaaagacaaaagtcaaaactgaaataattaaaattagcaaagtacctgctttgattgataattgagctaaaatatttaaattaagtaatagtaatactaagttctttgcattaaagtgtcgatctaaaaaatataaaatccccatgtaagagataattgtcaattgatataaagcaccaatttctgataaagggaagatatcaagattatttagaaccactgctaacgctaaaaaaactgaaagaagactcaaagttttttctaaaaaccattgatctaaatcttcaagaggaactgataaagctaataagagcaatattaatccataagcagcactaacaatgaaaaagccattatcacccttccaaatattgctactaaattcaaaaattaaagggagaattccaattaaaattgctaaaatcttgcttttatgataattttccactattttcacctaaaacaagtttgtaataattttcgattgctactaattggtttttcattgaaaaagcgtgcatcagatatgtcttttctttttcagccatagccatgagatctgtcttgctcctagccgtagcttgtcttattttttcactaatgctgtctatatctccaattttagcaacaaaaccatactcttcattaggaatcatcttctcaatatcaccaacatcagttgacaaaattggtactaaattatcactagcctctaataagacaagggggaaactttctgaataagatgttaaaactgccaaatccatcttttgatataactttctagtctcttgatgagtcaaaaaaccatgaaaagttacttgcgaactaattcctaagtctcgtgctaatgctcttaaattatttaattcactgccatcgcctacaatatgcaagcgaatattttgatcattgagattttttattgcctttaaaagcaaatcttgtcccttaactttttcagctcgaccaacattaataatattgaaatagggatgagcatattttttaggaacatccttattttgatggaaaaaaatcccattataaattacgcaaatttttgttttcggaatacctactttttcaactagaaggttagaaaagttctgggtaattgcaaagataccatctgctttttttaaagccatgatatttaatttagtaaaaatatttccaatcattcctcgaccttcaaaatcctttaaaggatcagaatgaacggtaataatccactttgctttgatttgctttttaatcattgagacaaacagattagctcttgctccatgagtatggactatatcaaaattcccctcattgataaacctcgtaagacgctttaaaacacttaggtcataacggctttgtgctcctaaaatggttgttttaatttttgcttttttagcagcttttgctacaggtccatctgctaaagttaaaagctcaaaatccacattttgtctttttgcttctgtcaacaaattaacaatatgagaccgtcccccacctttttctaaaccagcattaatatgtaaaactttcatttaattaattctttcccttattttctttctttgatttttcaacttcaactacaaattctggcaatgcgagcatgcgcttaaaacgagttggattagtaattaagcgatagaaccattcaagatgcgttttttgaaatacttctggagcacgtttgactacgccagaaaaaacatcaaaacttccgcccactcccatcataattgcaggcacttttgcctgacgtaggatggagatcagctcttcttgtcttggaaaaccaattgctgcaaaaaccatatcaggacttgattcttcaattcttttagctaccgtctttagatcatccttaaaatagccatcttctgctccgactaattcaattcctggatactcacgagcaatcttttctttggtaattcgcattacttcaggctttgcaccaattaaatatactcgcaattttcttaagtttcctacctgtagcagccaagtaaatagatcataccctgttactcgttctttaagcggtttttttaatatttttccacctaagacaattccaattccatcaggtgtaatcaaatccgcattcttagtaataaggttcataaattttggatctttattagctgccattacaatttcgggattagctgttactaccatggttgataacatattatttaacctactaatcaatctatctttaaattcttctaaagaatagttatcaaattcaattcctaaaatattaactttactcattctctactttttaaccatttctatgtgaaataatatctttacttattattttaacaaaaaagctgtaggaactttttcaatataaaagtttcacttttttatacttctgctagaatagtaactattataagggagtatttattatgaaaaaaattattacctacggaacctttgatctactgcattatggtcacattcgtcttctaaaaagagctcgcgccttaggcgattatttaatcgtaggtctgtcaacagacgaatttaatgaatttagcaaacacaagcaagcctataatagctatgctgaaagaaaatatattctagaagcaattagatatgtagataaagttattccagaagaaaactgggatcaaaaaattaatgatgtacaaaaatatgatattgatactttcgtaatgggtaatgactgggaaggaaaattcgattttctaaaaccttattgtaaagttgaataccttgaaagaactcctggaatttctacgacacaaatcaaaaaagacttgaaataaaaaatgcataatgtagttcatatcacaaaatcaaactgcattatgcattttttatttttcaaatgtaaattcaaatctttcggccacatatgatgcacgaacatattcaaaaggataatgattactgagttcagtcacctggcgtctagttactaatggctccccctttttaactgacaataaacgagcctcattttcattagcaacagctgcaccaatattttctacaacgctcccaatcttatagccacccttttcttcaagcgtttgatataaactacttgaaatttcatctttagaaaaacgggaaactaattcataaggaattgtagccacttcataacaaatcggcacattatctgcaaaacgaacacgttccattcttaatacgttatctgtatcttgaatttttagcttttctttttcagataacgatggcttcgttatacgataagatagtaatttactagaaggaacctggccattagaacgagttatatcggtaaaactcatgatcccagacattttctcttgaaccttttgactagagacataggttccactacctaagcgtctctctaggattccttcgtcttctaatgtcttaattgcttggcgcaatgtcattctagaaacattgaattttgaagctaattgccgctcagcagggatccgctctccaactttatattttttattttcaatatcacgctttatttggttgtgaattttaatgtacatcggttcttgcatgataacccctcacttcattctgctaccacacttattttagcttaaactagctgattagtcattgttcttctttgcttcccaacgcattcccaaaatattaatatttggtctcctattgcattcaacctctaaatcttgagcactacttgaaacaatatttaatttaatcttagcatcatcctggactgcaagcctactcccattgggattaataattaagtctcgtcctcctaaagttgcttgcccatttaaggctaaaaaatactcaaaatcatctcttccagaaaaggcgactctagttgcatctgctgtggccttatcttgaaaatctgcgtgactaataatagttgaattgtttaaggttactttcgcattatcacatgcaattagacggtctattttactattttgaatcaaagttctcgtattcttatcaagaaaaatgctgcctttaaattcagattgtaaaatatttacccatgaatcatctgaaatatagaaactagagtcatcgttcttttcaaccgttgaattgagcatatttacccaagtctgcccatgaattaacccataggaaatagacgtattattcaaatcaacttcagcatttgaattagggtatgtacttagattaccatgaatcatactgttagaaataattgcagtcccttttccctgaatacctaaagctgcgtaattttcagaatcataatcaattaatgaatcggtcattgtaagtctaaagtcagcttgtgcaaataaggaaacactagaattcaaaattttacttgaaaataattctaatgtacattttccatttacagcaattgcggccatatcatcttcatccccataaagggtagtattacgtaaagtaagataggtatcggcatcatcttcaacgtaaatagtattatggcctgattttgtttgaagagcaatattttctaatgtaaaaaagttacaattattctctaacacaaaaaagccactaattaccgtctcgtcgggagtattacctgtccccttgatagtaatattatttacttctaagcctcgatctaactcataaaatccaggagcaagcagtaatacatcatcgggctgcaagtctttaagagcacttttccaagtagtaccgtctcctcgaccactgactttaataagacgcgccatacaaatcgatcctttctacataaaaatttcacacattattccctttattttcaatgttctctgcttaaatataatcatcaatggaggtaactatgattaacattactacaaatcaattagcagaaattttagcacaagattctaacatcaatttatatgatttacgaacaccaattgaatttgcatcaggtcatattcctgatagtcataatcttccttttgaagaattaaaatacttcaatgatcctaaaaatgagacctactattttatttgtcggtctggcgatctttcacatcatgtatgccaacttttaaaatctaaaggttataataatttaattaacatttctgatggtatccttaactggaaaggtaaaatacaaagtataaactaaaaatgcaatataacaaaaaaggtcatcatatgatgacctttttttcgggttgggtgttctttcgaactattgggttagctggattcgaaccagcgcatgatggtaccaaaaaccattgccttaccacttggctataacccatttgattgaacttttacttgttgttcaatgcaaccagctgaataaaattcagcaatggaggccagtggattcgaaccaccgaactcagagagagcggttttacagaccgccgcgtttagccacttcgctaggcctccgaaacgttacttaattataataacgaactgcctagcaaaaagcaagtaaaaattagaaaaaaatctaattttttattttagtattacctactttaattgagcgatatgcttcttaatgatatcagctgattcccttagcttttcatcttcttcagaagttaactctagtggaataactttttctaccccatcttttccaataattgctggatatccaatatatgtttgtacttcatctaaatatacagaagttggtgcaaataatctggcatcactaaatacagcttgaattaagcgaacagcacaagttgcaattgcatatgaggtatatccttttccaaatgctactttcatcgaatttttattaggttgtgcacttaatttttcctcttgttcttttgtgaacagttctttagccgacttaccattaactgagacagttgaccaagcagtaaattgggatgctccatgttcacctaaaacaaatcctgctacatttcttggatcttcattaagtgcttccccaacaattctttgcattctagcagtatctaggaaagttccagttccgaaaacttgttttttagataaaccagtagtttcttgcaagatcgttgaaatagcgtcacatgggtttgaaatattaattaggatgcccttgaagccagattctttaattttagctcctacttccttagcattcttagaattaatttcaaattcaccaaatctatctccagttttaactgtcgcagcaatattaccaaaggaagttacaataatatcaacatcctttaaatcgctatagtcacctagaaacacattaacatgataatcattcctagctaaagtatcacgcaaatcattatattccgcctctgctttagcttggtttttatctaataagtataaattatcaacaattccatgagtaaataaagtaaaagcaactgtcgcaccaacatgtcccataccaattacggctacatttctcattgtaattcctactttctataaaactttctataaaaattcttacaccttaaggataatccatttgccctaagttttaaattcattttatatcttttgactagaaactattttttcatgctgcttaatcttttcaattcgcttctcatctcttttaataagtaacaaaaacaaggcttcaataattgtaaaagctgctacacgagagaagtaatattgattttgtaaaactgtttgtcttaccccggtccttaaatgataatcactatttaaggcaatcggagaatctggattattagtaataccgataattttaattttattctttttagccaactcaatttcttttattagagctgccgattctggggaatgaaatatccatttgatgaaaaacaattttttgtaaattaaaagactagagatggtgcattttttgtatcatctctagtcttttctattagttaacaaaaattgtattttttgccttccaatcgcgaatttttattcctacccaaaagccataaatgccgactgtaataatagttaaaagtagccacttaatccaattcccaaataatccaaaggcacttccagtaaatttcatcctgtgtccttcaattacagtatggttaatttcccaaccataaatcatgcacacagcccaaggatagcaaatccctaatgtacaaacagtaataagtgttcctaagatatgccaaccaataaaagaaattaagcccccatcaaaaaaagaattacgtccatgccttgtttccattatgatctcttccaatccaaatttatgtacaaaaaaagccaggttttacctggcaaatctattgggttagctggattcgaaccagcgcatgatggtaccaaaaaccattgccttaccacttggctataacccatccttcaagccttttacttgttggctctatttgaatgaacttaatcactcaacgattaatatcatattataaatacgaacctctgtcaacaaaatcctctaaaaaatatttattatttttaaaattaattaggagcataaaaaagatcgccttttggcgatctttttaagcataattcagttgatattttagtaccagccgttagtttgccagaacttttgagcaccagtccatgaaccgtaacgtgattttacgtagttatctgctacacgttcttggtttgctgctgagtagtctccaccaaggtatgatgctgataattggtacttaccaatgtattgaccatttcttgctgagtatgaaccacctgattcacggcctgcaatccaagctttagctgctgcttcagaaccagatacgtttgaagtgtagctagttgttgcttgagtttgagcaggttgtgctacttgagtagtttgcttttgtgctggagcatagctgtaagttctttgttgtacaggagctgagtaagtacgttgcacattatagttgtagttagtcttaggagcttgtgcttgtacagcagtttgttgcttttgttgtactggagcttgtacttgagtagtttgttgtgtagaagctacaggtgcttgcttagtttgagcttgtgcaggttgtgcagaagcttgttgtgaagctgcaggagtagctggttttgcttgttgtacttgagtagtttgttgcttttgtactggagcttgtacagtagtttgtggttgtacttgttgtacaggagcttgtgcttgaggagctactggagtagcaacttgggcactagcagcatttccgccttctacagtgtacttagccatgatccattggtttgcaccaagatcataccacttgttacccataacatcgtaagcagttcttataactttccaagtagtaccatgtactaattctttaccagtaaagttggcattttcaacgccatcccaaacggcaacagtagagtttgcattgttaatagttacaacattagtatcattttgaacaatagtagcagcttgtgcgtcattagtattttgtgaatttaaagctaccaaaccagttgcggtaagagcagctgctgcaagtgacttagttaagatagattgaaatttcaagagaaattcttcctttcatatttatcagtcatttaatttacaagttacataatacagcctcaaaatgtcaaaaccatgacatgaatgctaccacattattaaataaaagtgccttatgttacagtttatgtaatatttgtaacttgaacacgctttcttgtaatattcctatataaaactactatgccttatgcatcagccctattctgtcttactgccccccttaatgatttattagaggctaagtgagaaataagacgagaatatcacaaaagtgaattatgtattctccgttctcgaactatgagtacaaaaaaagagatatcataactgatatctctttatatatattcactaacttttagtaccagccgtttgcttgccagaagctttgagcgttagaccatgaaccgtaacgtgattttacgtagttatctgctacacgttcttggtttgctgctgagtagtctccaccaaggtatgatgctgataattggtacttaccaatgtattgaccatttcttgctgagtatgaaccacctgattcacgacctgcaatccaagctttagctgctgcttcagaaccagatacatttgaagtgtaacttgattgagattgtgcaggttgtgcttgttgttgtactggttgagtttgttgtgtactttgagctggttgagtactttgtactgaagagtaagtacctacagaagtcttaggtgctgagtatgaaccttgagtagtttgagtttgtgcagcagtattgtatgaacttgcttgtgaagtaaacaattctgaagcaacattaggatcaacagtatctttacctaagcgagtatacttagccattacccattggtttgcaccaagatcgtaccacttgttaccagcatcgtcatatgcagctctgataactttccaagcagttgcatgtggtaagtattgaccagtcatttgcttatcaggaccgtatgaattccaaacagcaatgctcttgtgtggaaggtagttaattgtaacaactttttcttgttggccaacagtaacttctgcagcctttacagtgttttgagtgttatttacaattgcagcacctgctaaagtaagggcagcagccgcagcagttttagttaaagtagatttcaaatttttattaagcatatccaaaattaaattctctccttgataaatttgatttgaatcattatttcgtcatttctatttacagcttatataatacatggccaatattgcagaatagttcctagaaaattaaggatatatttcatcttgttacattcctgtaatatttgcgccttaagttacaataatgtaacgatgtaatctttctgtagcaaaacaaagaagagagagtcatttttcttaactctctcttcttttctttatccatctattcttaaattggttaaatttctttgtatcagtaaactttaactgcgggaaactcgtaaggaatcgcttctgattccaggataatgtttccattaatttatcaaaggcctggtttaatttaccttcatctaatttcatacgagtatttaaacgctcattccaacttttagtactcatatgtagtttctctacactaaagatagtaagaataaagtctgttcccatcacaattactattattaaagcaagatagccatgcgtttttatttcttcccaagtaattaacttttgaataaatggctgaataacttttacaagaaagactacccctatcccccaaaataaagaaataattggggcaacccggccttgaatatttccccatagatgagaatagtcccataacttcatatggaaaacatactgtaaaaatacactagcgaaatactcaaaaattgtcgctactattacaccaactacatataataggaaaatattattttgaatccgataggtacagattaaaatcgttgttactgcaaagccatatacgggacaataaggcccaaacaaaaatccccgataatcataatgatgatccttaatcgaacaatagattgtttcccatatccagccaattacagaatatgtaaaaaataaaacaataatttcagaaaaagtaaacggcatttttaatacctcataagtaatttttagactcttctatattaaagatatcattctttaatgaaattaaggcgtacaacacctctggaaaaattaactaaaaagcgtaaaaatattcttatctgtaattgaaaggtacatatataatgaagaaacttaataaaacagctagtaaatatgctaatattctacgcttttttaccataattgctttagaaattttaggagctttaatgcttatcctgatgtttagtcaattatttgtaataggtcgtattatgattagcaatcatttaattaacatacctacgaaagttttagatgaaatagtcactttcttcttattctttgaattttcggctatgattgtgacagccttaaagcatatgggtcatacaagcttaaactttttaatgagtctaggaattacagcccttttaagaaatttaattactgcgcatggtgaaccaatgcaaattttaattcatgcagtagcaatattattactaattattggagtagtaattttgaacaaacatatcaaattatagatttagttcataggctaaacgactaggatcctctggatcttcatcaaccataataatcccacgttcaataaaattatggtttaaagctaaatgttgcataatttgatttttacgtgatgtattaattctaaagtttttaattccttggtttaccataattgaaatcaaatctgaaaacataaaattagctaaatgcatcccgcgatacttactgctaatagctaaacgatgaaaagtaacataatcatcgttagtatttttccactctccatttattttctgataagttggctctattccaacaacacttgctgcatagccagccaccttatcatctactattaaaaccaaggcacttttatttttgatatcagttaaaattgtatcttcgtccggataggttccttgccattgactacttccgctttgctttagaaaatcttttgcttcattaataatacccatgatatttgataaatcggcgttagtggcatagcgtgtataaattaaagtcataatctcactcatttcatttttctactagtatacctaaaaagcagagcccccggccctgcttttttaggttatattgaatattaatgtaaaaaagagcctgccaaataaagttttctaaaactttatttgaaagactcttagttaataccctgagtgctgaatgccagatcaatgggtaatctctacaagtccaattatatcaagtacttacagtactaaattattttcgttgtgcactgactgtgcatttaattaacccacgtttccatcatttctttatccacatctttagtaacacctacataaaccttcataaaggttgctaaagaatgccccattctttccgctgcccacgggtaagaaattccaggtttatttgcaagtttagtacaaatagtatgtctaaaactatatagagaaagttttttattcttagaattaatatctaactttttacatactttacgtaacatatcattcataccgctttgagataaaggctttcccattgtagcaaattgatagtttcttaaatttaaaaatactaaatccttattgttatgtatttgatggtctttcaaaaagactttctgtctttccttataatcctgtataaattttgcaagatcttctgaaataggcaatacagtacgagtgaatcctttaggacgtgcctttaaagcaccgttaaaatcttgaatataatcagaccaactatctgatattttaaaggtccaaaaaccatctttttttattagattagaaaattttaaagcttgtacttcagcaggacgcatgccagtttctgcttcaacccatatagctaatttggcatttgaattataaacagtagacttatttaattctttttttacttcatcttttattaattgaagttcttcatcagtaaataaatattgttctggttgtactgtgaaatcacttttcttgaagaactttcttaatgcacgttctggaacaggattttcttgaattgctataccagccattgctttaaaaaagtttctcatatgaactaatctagtagcaattattgaagttttacttacagtagtatgatgggtttctacataaaaatgtgcatattcattaaccatactagtagatacatctttaatcttaatatctttaaaatactttttaaaagatttagccgaatcattccaggccttcaaagttacaggagaaatagtcttttttctatcccctacatattttaaaaaggcatcgctaaatacatcattgcccttagtaggttgagccaaattttcaaatttaagccacatttttctttctagactaatagcttcttttttagtgtctgtatattctacaggacacgaaacacgtttacctgtaactttatcaattggttgtatccgaacttgccacttattcttatattttcctttctcaactttttttatcatgtttctatctctcttctttcaaaaaagggatagaacaaagattcaacttctattctatcctgcacattttatttagtccatttttcttctttatgaaatgctgaggtttttaaccaagtttcaacatcatctaataaataatatgctcgtccccctggtagttgatggtacggcattccggctcttctaaattcataaaacaaagtggtactaatccccagttcttttctcaatgcttttccatttaacagttggatcatatcaaatccctcttttctttttttcaatatcttgtttaattaattcgtcttttaattgttctaagtacttatcaaaatctattccttgtgaagcattttcaataatatttatatcttttttcatagtatcggagtaatgataatgtccattcgtatcagataaggaaatataataattaagaaatttatagaaggattccagcgaatcttttccaaaaacgtctctaatcattacaaccactccaccagctccattttttagaaaccaattaatttttttatttaatgaagcatctgtctgcgcttcttttaattcacttaagccatttccctttgataagtcatataatgctctccattcaggagaatactttttatcattttgcatttaactccttttcttcaataaccaaagaccatctttctaatacacaacttaataaatacggatatatattatctccctcataatttgtaatcagctgtcctatctttttagccagacgatgtttaaattctgcttccaccctaatccagtcattgcaactaagcgctatacttctatacattccatcagctcttagctgttcaacctttttatcatatattcttagaaaagcatcactttttctgcttccaacatataaagtctgaacattgtccatatctcctatagccttatatctcttacgatctatcctattaccgatcatatttaagaatacatatttgccttgttgcaaactttggctaatcgtatttaccgaaaagccataatctataagatcggtagcaatatctatacgtgacacatgccctgaatactgattgcatacactggtaattaaaactttccagtcgattttaatactataaagttgagcaagattctcatataaactcttaccagtagcagtaaaatcaattagaattcccatatctttcctgtttctgttgtacataacagaaattttcccattctctccaccaaactcaaaggaatcagtatagccattatgaccatagctctgagaataagtatcaaatatcttaagaaaatgaaaaattctatcaaccactataacttcttcaggtatttcattatttagaaatttttccatgttcaaattttcataaggaatattcaaacgaatttgatcaattttaatatctgatttcatcatttcacttccctaacacccatattattattaagtgggtgttgccagctcgctccgcttggacattccattcgtgcgactccgtcgcccgccagctggcaacaaattaactaaaacttccagtaactggattcgtcaatataatcaatactagtattagtttgttcgagcctcttaattacaccaggaacgtcaatatttgtcatatcggcagcaataaaaggaataggattatttatcctttgtccgtctgaataaattaatccatatcctggttgattaggtacaaaaggcaatgatttaatatctttaatcatcggataagccatcctataggtatcaccatctgcttgacccatgacaattcttgtccctaattgcaacgtaatatcacgatccaatattgatgcatcaattctctgacctgaaataagagtaaatatacctgcttgtcgacctcgaagaataatctgtctcaattgactaataatttcttttttattgtcgtcggcctcagccaacatagctgatatttcatctataattaataagtaaggttggaaaccatattcggcaaaatcttgtccccattttccattactaaaatgttcataacgattattcatattctcattaattattctaagcattctagcaatttgatttgttgtactcactacaactttatttccattaatgagaattttactcaaactaaacatatcagctcgtttagcatctacaatatataaaccgcagtgtacttgcgacatactttttaacattatataagtggcaagatttgattttccggttccgcttcgtccgataagaagcaccccgccgcttcctttaagattaaatgtgacattgttgtcaattgccataatatagttagaagtcatcattgttgacctccttcttatttgaagatatatctccgagtacgtaagtagtgtgtgttagttgattatcaacagaaatgacagttagatcaaatgcttcctgcaatctgtccgttaattgtctaactcgatcactattcttgataccgttgggataaaaagaaatttctatatcaccattacttattttttcataaatcacttttatgccagcaacaacttgtcgcatgctgaatatagatgttttatttttatcgtcataatcaactagctgggctgattgaattactttttttaatgcataaaactctttgtagtgaattatattaaaatttatccacttccatagtggacaaataacgggtacaatgagaaggaagaaaggatagaacagaacattattgctttcttcattcttaataattctcggaagagtagtaggcaatagtttaatgtaaataaacgttataattagaattataactatcgctaatactctgaaaccggtgggacttcccagcggtttttttgtatcataaacaaacttatgcattttcatcatcttctttctataatttcattgcgtcttgaggagtaagatctaatattctaatattgcttgctgataatccttctgcattattaaaataccaatgagataaatcatcaaaagcaactactttatttttttcttgccccaacaacaaagcttgattttgttgttcattaataatacttcttgaatttttgattttaataataagaacagtaccaattgataattgtgtatttttatcaataattcgtacttgatatacagcacggggaatcatattatcgctctcattagattctggaaccatctcggtagatccacttagcaaaagaaagcatttgcccactacttctactaaaggtctagtcaaagcagcttgaataggtactcttttactcatattttcattaaatgtgtttagcaattcaccgttatcagttacattattttttgaattcatattttttctccttgtaatatataaataagctagcatgatttttgttcgttttatttatgaactattcataattttgctcctttctttattcaatattactatacatctatatttgctccttttcaactgctttttataaaaaaatgttccgttctcacggaacatgatataatttagttaattactacttagaagggtatttaaaatgggcactttaagacttaaatatattagaaaaaaaatgggatttacccaagaagaactagcgaactatttacaggaagtgaagcacttaaaaatatcacgaggaacaattgcaaaatatgaaagtggcgtcaattttccttcaaaaaaaactttgaaagcattatctgaggctttagaagtatctgaagactttttggcaggcaaaggtttacaaaatgaagatatagaagatgcattgcttaatcttttacaaaaaaatttctttatttcatattcaaactcaaatgatagtactcacaacgctattaagaactatcttggatatttaggcatggataacgagccttacaatttttataaagataataatggagacttaaatatcgtaatggtaaacgccaattttccgagatatgaagcaattgacgatttttggaaaaataactttaaatttctctttgaagataaaaaattcaaagaaacattaatcggatctaataaaactgaattaaaagaaaaagttacaaaaaagattaatgaacagtttaataaagatgtcaaaaatcgtaatatgagagccctcatagatctaattgatgaaacaagtcataagataaaaaaaggcattctaaaagaaaacaaaggtgaaatctcaaacaaggatttaggagaaattatagatcatgaaattggaagaatagcatggttttcaaaaaaaataggaatcccagtaacaacgcaagaacaaataaaagaattaaaagctctagacaatttactaaacaaaaaagaattgtaattttttctttaatgcacacaaaaaaagcgggttttcgcccgcttttatcatctttgttctatccttaaattactttctgtgcacatttaatttttttctgtgcaacaaatgtgcattttttaatgttatctattaaagctactatatttaaatatattaaaaacaccatcaaatcaatgtttataatacctaaatataaaaaaatatgctgaatgccaggatcgaactggcgacctcttctttacgagggaagcgctctaccaactgagctaattcagcattaacactagaattataacaaagattttcttctcctgtaaagcatcagtaaaattttacaaataaaaaagtcgaagtaaccactacttcgacttttaattaaaagttagccgtatctggatcagtagctaagtcgctaactccatgtaaactatctaatttgctcatctgctcatcatttaattcaaaatcaaatacatcaatattggctgcaatgtatttatcgtgaactgatttaggtaaaggcaaaaatccgtgttctagagaccaacgaattaaaacttgagccggtgattttccaacttcattagctatttcgttaacaacttcatttcctaacaaaccaccagtgcctaagggactgtatgcttcacttaataatcctaactcttcatttactttcactacatctgattgtaaatcacttggattaagcataatttggttaacggctggttttatttctgcagttttaagcaattcctctaggtgatgctttctaaaattagaaactccaatagctctaatcttacccgccttaactgcttcttccatggctctccagctttctgcatttgcttcagcccagtgatctcgaagagccaatggattaggccagtgaattaaatataaatctaaataatctgtccctaaattttgcaaacttttatcaattgcagcttttgcctctttataaccatgatctgcattccaaagtttagtagtaataaataagtcatggcggttaatgccactattcttaattccttctcctacactttcttcattcccataagctgcagcagtatcaatatgtctgtagccactattcaatgctgcttcaactacatgttttgccacatccccgtctggagtttgccaagtaccaaaaccaataatcggaattttgacaccattattcaatgtatatgtatcttcaactgaattaaatttcatatttttcctcatttctttaattacttacattataaaagtaatttttgcttttttcatgaaatttggatttttacaattaatttatttaaataagtcattaaaagcttcagacattgtcggatgcgtataaatctgatctcttaaaaccgtataggataaatgggccttcatcgctaaagaaatcatattaatcaattcatatgactcaattccataaagtgtagcccctagaattttttcagtttctgggtcaacgagtgccttaaataaacctctattatcttttgcaacctttgctttaggaattgctgtaacgggcaacttaaataacttgtattcttttcctaatttatttgcttgcttctcatttaaaccaacttgagacaaggcgggtgaaataaatacactataaggaactacctttcggtcactaaccatgcgagcacccgtaccaaacagttgatctttaataattctaaaatcatctaaagaaatataggtaaattgaagaccgcctttaacatccccgattgcccacacattgtccacagtagttcttagaaaatcatctacttttatagcgccacgatcagttgtttcaatcgcagtattttctaaacctaagttttcagtatttggtttacgaccagttgctaccaaaattcggtctgcattaatcgtctttctttcttcatttatttgataggtaatttttgcatcacttgtttcatcagtaattttttcaatatcagcaccaagttcaaacttaataccagcatcttccatatcttttcttactgcattactaatatcctcatcttcacgagctaaaaattccttattatgatcaagcactgtaactttactaccatattttgcaaacatgctagcaaattccaacccaatatatcccgctccaataatcgttaaattctttggcatcttcttttcatccatggcttgagttgaatcaaggatatacttgctttcttttaagccagggattggtaacatcactggaactgcaccagtattaatgaaaatacggtctcctttatactgaacctttttaccattaggaagttttacttcaatttcatgatcagcaataaaatgagcttctccgtctaatacagttacagtcttttcatctgcaagcatatgatagtttttctcccgcaattgtgcagtcatttcatttttaccgtttaccgcatccacataagaaacgccgttagctgcttcaataattaatctttttgaaggtaggcaggcaatgttaatacaagtacctccatacatcttattagatttttcaattactaatacttcttctcccttttgtgctagaaacttagctaaggttttcccaccttttccaaagccgataattatgtttttaattgtctccatatcattttcctcttactttttacaagtttattcttttaactattattttatacataaaatattaatttgcatcttttatgcttataaatttttatataaatatctacatatacgaaaaaatgaggatacaaagttgtttcacaattatacagttatggctaatcaacataatatactaatgaaagagaaatactctgatgacactacgttgagtattcaacaaagtaagatttatgatggtcaagatgcttttttatacactaatcatcattattctaaacttaaatttgtaaatttaagttcagcccatgcggccgttgatttaaaagaaaaatattttgcttgtaaaattgccctcttaaactttgctgattatctttcacctggtggcaggtatttacaaggagcaactgctcaagaggaaatattatgtcatcaatctaacctatatcaaataataagtaattttaataaatactatgaatggaataatcagcatataaattatcatctttatcgtaatcgtgctatctatagtcccaatgtcgtctttactaatcttgatggtacattgataaatacaatcaatgtaattacctgcgcagccccctattatagggaagcccaactatataacatttcttatgaagaggcttgcatgactttaaaaaatcgaatgtattttgttaaaaacatagctgaagatcaacaaatagattatttagttttaggtgcatggggagcaggcgcatttggtttttcttcaaaagaagttgctaaaatgtggcatgatgttttttctcatccctcttcaataaaagaagtagattttgcagttatcgatattcacggtagcaataatacacaaattttcaaatcagaattttcaaactaagctattatgataaaattaacttgattcggttattatttatttaaaaaggagtaacgttaatgcgagtattagttatcggcggagctggttacattggctctcacgctgttagaaaattaattgaagaaggaaacgatgttgttgtccttgattctctctacactggtcacagaaaagctgtcgacaagagagctaaattctatcaaggtgacattgaagatactaatttagtaagcaaaatcttacgtgatgaaaatattgacgcagtaatgcactttgctgcttactcattagttggtgaatcagttaagaaacctttgaaatactacgataataatgtttctggaatgatttcactacttcaagctatggaagatgctaaagttaaatatttagtcttctcttctagtgctgctacttatggtattcctgaaaaattaccaattactgaagacactccattaaatccaattaacccatatggtgaaactaagatgatgatggaaaagattatgcactgggctgacaaggctaatggtattaagtcaatcgcccttcgttacttcaatgtagctggtgcttcaagtgatggttcaatcggtgaagatcacggacctgaaactcacttgattcctaacattttaaagagtgctattgcaggcgacggtaacttcactatttttggggatgactataacactaaagatggtactaacgtccgtgactatgttcaagttgaggacctaattgatgctcatatcttagcccttaaacacgtgatggacactaataaatctgatgtctttaacttaggtactgcccaaggatactctaacttagaaattcttgaagctgctaagaaagttactggtatcgacattccttacactattggtgcaagaagaggcggagaccctgactccttagttgctgattcaagcaaagctcgtaaagttttaggctggaagccaaaacatgaagatgttgatgacgtaattgccactgcttggaactggcacaagagtcacccaaagggttacgaagataaataaatcaaaaaaatccattcaatcatcacgactgaatggatttttttattgcaattgattaacgcattttctcatttcttcaatatctaaaatactatgagcaaattcttttctcactaattcatcgggcagatattcatcatacttatcaaataccggtacttcatttggatacactagctctaatgagtcaaaatctttattagcttcttctactaaaatttctaaaaattcttccttacttacatccattgcaaattgcataaaatacggacgactagaattaaagccacgcaaaccaattcgcttagcacacttaattttgattaatctttctaaagctaaaaatgcatatgtccctgtccacggaaagagacaccacatttttccacctaagttaattaagttgctttctagcatacccgaagttttagcagtatcacgcacttctttaagacgcgcagtagcatgtttcattagataggggtattgctttttctcggttaaaattttattcattctttgtaaaatctcaggttgaatatctcctgcaacatccccaaaatatgccggaatacgacctttaacaggatggcaatagacttgatgtcgtttgcgatctacatcctctactacccaaacacgacccgctatcgctatcttatccccaacaggtggcggtttaacaatagttcccagctcttctgattctgacttaacagcatattcttcattttcttgaaaaacagcataaaacttaaaattattaactatgcgctcaccacttagacctacaattaaaccaccattttcagtttgctgaatatgatcttctttaattagatgtctaagtaatactcgataatcatcttgactaacattccgaaaataatgcagtgtcaatactcgcgacgctagctctgcaggcgtcatttcaccattcgaagctaaagtagacatggtctgatggtagagcaaactatatggtaagcgatttggttcaggaggttctacccatctttcttctagatacagttgaaccaaagcaattccttgtaataaagaccatggaataatctcaggaagcatcgcacgggactcaggatgtgattcgcgcattacaaaccacatttccgaaggattgcctctacgtcctgtcctccccatcctttgtaaaaagccagatacagtaaatggtgcatcaatctgaaaagcacgctctaattttccaatatcgatacctaattcaagtgtggcggtagcacaagtagtcatcaaagaatcttcatctttcatttctacttcagcagtttgccgataagcagcggatagattaccatgatgaattaaaaaacgatctggctcatgttttacttcacagtattgtcttaatatctgacaaactgcttcacattcttcacggctattagtgaagactaaacattttttgccgcgtgtatgttcaaaaatataagccattgatggatcagctgtgtttggagcttgatcacttttctcatctaaaactggttgcgcgggatcaaaatcattactatcagcctgtgggccattatcgtaaaagtgttccattgatagccgccaaacttgtccacttccttctactttaggaacagtagttttatgtttagaaccagcccctaaaaattcagccgcagattttgtatcaccaattgttgcagaaagtccaatacgacgaagatcaacatcggccattttagataatctctcgattaaacaaaaagtttgtcctccacggtcagatcttaaaaaagaatgcaattcatcaattacaatatatctcagatcatgaaacaaattaggaatatccatatgtttattaatcatcaatgactctaaagattccggtgtgatttgtaaaataccagagggatgtttaagtaattttctcttttgtgtctgggtcacttcgccatgccaacgccatacaggaatatcaacatcctgacaaagttcgtttaaacgttcatattgatcattaattaatgcttttagtggtgaaatgtacagtacacccactgattgaggaggattttcatagagatcagttaaaattgggaaaaatgcagcctccgtcttaccagaagcagtcgacgcagctagcaagacattatctcgactattaaaaatagtttctgctgctccaacttgaattgaacggagatttttccatccatgttcataaatataatcttgaataaagggagcaaaacgtgtaaaaatatccatttttcacttaaattctaaactcagcaaaatcatcagacttttcattagaaaccgcctctgattcggcataagaaaacttatccgaattaagtaatttttcaacgtcagtctctggattttgccaaacaatatctaataattcaataaaatcacgaataatctcacgtggcgtaatatttgttgatgctcccacacgtgaatattcaatttttatgaacttttgtaaatcatcttctgtaattgttttttcatacccatatagattagcatgcatctctgcaagtttttcagttaagacaagcatttcttctggggtaagaggatcaagcttaataacaggtgcatacatatctctattgccagcttcagaaaatttaccgctagcaagacgtgagcgcaatgcttcatatgaatatactccgcgtctcttatcttcaattgcctgcggggttccacccataataattccaagatacttcgactttccttgtaaggcatcgttgtacattgttaatatcttttcatagttatattggcggctaatactattcgggattttatagatatttactaactcatcaatcataatcatcaagcccgcatatccagcttgtctaaaaaatgatgcgaataattttaaatactcataccaatcgtcatcagatattacaatatcgactcctaattctttcttagcctgtgttttattggcatattcacctctaaaccacttaacaactttggcttttgtttcttcatcatcattgatataggcttgatagtacatttcaagtaactttgcaaaatcaaacccgtgcactaattcagaaagattagaaattactgcataaattttcttattgactgcgtcttcaaaggcgggagtatcatcatttaatcctgtctctgttctaacctgcatttgaaccgaattaatccagcgatccaaaattaaggttaatgctccaccttccggtctagttttggtggaaagattttgaattagttctcgataagttgctaatccttgcccttttccaccctgcagccgtctttctggcgataaatcaccatcaaccacaacaaaatttttatccattacataatttctaatagtttgaagtaagaaacttttccccgagccataccgacccactataaatctaaaagaagctcctccgtctttgattagctctacatcatgtaataaagcttcaacttcggcttttcttccaacagtaatgtatggtaatccgattctaggtactactccaccttttaaagaattcaaaatagtttgagctattcttttaggcacttttctatttttattaatagccatactttagtttgttcctttcaaaaacatatcttctagatcttcttggtaatcttcaattactgtaggtatatcatttataaactcaatgacattatcaccaaattcatcaaaaagtttttcatttatgttatcaattataacggcagccattaaatgatgctctttaagatatttgtttaggtcttttccctttaaaagcaaaattatggtggccatttcttctgagctcaacccatagtcttcctgctcatcgtttacaacagtttcttcaatttgctccctttcttcttgctcagcttgaagttcttcttcagttaataaactgtctcgagttcccgctgcatcctctcgaattgtagataactgggacaggttaaattcaattttaggctgttttaatttttgttcctctatttgatattccttaattccatccctaatagccttaagataatgcttttctatttttctaggttttaaatttcgtcccaaattaaaacataatcttatttcgcgatctacttcatgcaaaaaattacccataatacttttttgaccagtcaatccccagtaagactcacaataccaggtattcttttcttcatcataaaaatattttctaatttgatcaatttcatagctagttgtctttggctctagctgatgattaaatacggcagctgaaaatagttgaattgtcatctgattcttataagcaatataactagtaaaaaaatcaaatccatcattacgtaaatctaaaattttgtgccaaattagaactaaaagatattcaaatttttctatactctttttatacaaggggcaattgctaatcttataattagataacttcattaagttttctgcaacttcgtggttagaaaattgatctgggtataacaattgttcatactttttatcattagtctgttctttaacaaaaaacgtattatttgttttatttatattataaaaaataatataatcgcgaatccatctttcaagataagcactcatttccggtgaaaatttttgagcataatttttattaaaagtaattaacttatctaatccttcttctggatccttaattccaattccatttagtaattcatacaaataaatgtaagcataggaatctgaaattttttcatagatattttgtttaattttcgtacgccaagtaaaatacgttcgtgcctgccccactgttaagtcgtggtaagttggataatatcgtaagaaagactggtggccctcatagtgatcttcatatgaagccactaatttaccctgtaaataaaaattctgttctctacgaaccgatcctggtaaagaatattgataggactcaatcatcctttttatttctttaggaacaagctgggtatcttcaaaatttagattaattttttcttctgtagatttttcttcttttcgaagtatattagatgaccttttccaatttttaaagtttaatttttgctcatgatagacactttcctcatcattttgaatagtatcaggaatataaattaatttttcaggattaggtcgtttcttggacatgagagcgattttaaaagcatattccaatgctttttttattttttgattacttaaccctaagctaacttcaacccacttagctttttttattaaggatgacgctgaaaagccgggtaagtctttaattgttgctgcaaaatctccacaattaatatttaaacttttatttctaggatctaaatttaaaagagcaaaccaattcttagtaatcggtgaactaaaagctaccaaattaggattgtctttaacttcattaatactgttttttccaaaatgtcgtatagcataacttaataattcatcggtattcatggtccccgctcctttcgaacatatattctactatatttttatttatctagccacgaaggtacaataaaaaacgctgaaatcataatgatttcaacgcctttaaatagattcattattttacttggttaataacatcaattccatttaagctgcgaggatagacaataaatggaacattagctaaaacagctttagttaaaaattgttgatcattccctagacctacattatcttttgcgtgagccaacaattgtgattcacatcctccttgagcagctaagtaacaaaaagttaccatttctctctctttatcatctaggccattttgggtgtaataatctccaaagcaattattaaccacttattaatagttccttttttagcaaaatctttcatttgtgatccaaataatctaatttgagtttcttcacctttttcaagacgatttttcatagtagtggtagcttgactaggtaatggcaatttaataccacgattgagcaaaacttgatttgttgcttcaaaaaatggtatcacacgtcccaatcctaaataatcaactgcttgatagattacttcttttgcttcaaccggacttactccattatcaagagcaactggaagcattaaatgatattcttctaggccctgcatccctaacaaatagactaaattagataataattttattttatttggtaagtctatatcatcttgtacttcctcaaaagtaaaatgactaattctttcccaaccttcaggatcatttgcctttaaaactactttatatgcatacaaaaacatactattaaagcatagatttataaataacattatagtaactagtgttatcattttatctaatatgttcacatatatatttatcaaaccattagttatttcaaacctatacgctttttttataaaataacatctttttcttgaaactataagtattaaattttatagtaaagatgattaagttaataaaaagatttcaggaggtatattgttatgacagattatgcaaaaagagaaatgaaagcattagacagaattgctaagaagatttcagatgcagaaagtcacttaacaaagattgaagatagtattgatgataagaaacatcgcaccgctcaacatgaaacaattaaggatattaaatcaattcttaagcacgcaagaaaagtcgacaaagacgaagacaaaatcgaagagttcaaaggtgaaggtcctaaagattcaaccgaaaaccactacgtctatgaagaagaagaagaacctgttatcaacgatctaaagaaggacttcgcagaattagatgacaaacttgctaagttaaatgacttcaacggtggagatattgatgctttcagaactgaacaccactatcttgaaaaggctcaagacatcttgaagaaagccggcaaattaaattagtctaatttacagtaatattttaatttacatacatactctggaccttataatttttcataagatccacattaaaaggaatacaaaatcataatttgataatgtattccttttttatttttcaaaaattaatctagtctaactaaaaagggaagcaatacattgctttcctttttacgtgcgaattcatattaatattttaagagagatacgaaaaaattaagcttcaataccctttccagtgtaggtttctttcattagattcttaatttcactaattaataaagcagaaggatttgttacaacgttttggtcgccataagcttcaacggccatgttttctaccttattattaaaatcagcttcactaattccattagctttaaggcttaacttcatcccaacagcatgtcctaattcaacaactttcttgattaaagcatcaattagttcttggtcgctatttccttttagtcccagactacgtgcaatttctgcataatctttatcagctctaaaagttgaataatgtggacgcatagcaagttttctaggctttttagaattgaatctaatcacatatggcattgcaatagcatcacttaagccacttggaataccaaactcagatgattctgtatgagcaattgcatgtcctacacctaagaatgcattcgcatatgccatgccagctaaagtagctgcattatgcattctacttctagcattttgatcaccattatatgatttttctaagttttcaaaaatcaacttgatagcttccatcgaccagccacgagtaaaatcagtggccatagtcgaaacataactttctactgcatgagctaatgcttcaaaaccagagcgagcaatcaattcctttggcatagtttctacaaattgatcgtcaacgatggcaacatcaggatttaaagaataatcacagagagtatgtttaattcctgttttagcatccttgataattgaaaatggtgatacttctgaaccagttcctgaagtagttggaatacatactaattggatagcattatattttggaaatcttactgttctttttctgatatctaaaaattttgagtaagcatcttcaaaactcatatctggattttcgtagaataatcgcattgccttagcagcatccattacagatccaccaccaatagcaatcacgacatccggcttaaagatattcatccggtgaacaccatcagcaattatatcagtatctgggtccttagttactgcttgaaagacctcatagctctttttaccacgacgttgactaataatatcagtaatttcattaatgtatttgctggctacaccttcatcagtcacgatgaaaaatctttcaacatcaggcatatgctttaaataatttgctgcattatgttcaaaatatgtcttctttggaaccttgatccattgcatattatcacgacgttttgcaactgtcttaatgttaagcaagtctctagcaccaatattatgtgaaaaagtattagcaccatatgaaccggtccctaaagtaagggaaggaagcatattgttgtacaagtcaccaacgccaccaactgaagctggagagttaaccaaaatacggcatgcatccattttcattgaaaactcatcaattactttttcatcttgagaatgaacccccgcagtatggccgcgcccaccataatttagaaggtcggtacaaatcttataggcatcttcatgacccttagctttatacatggtaaatacaggagaaagcttttcagcagataaaggatactttttacccacacccttgtattcggcaataattaccttagtatcttctggtacatctactccacataattttgcaatttgataagccgaacgaccagcaactggaccagcaacagttcctctcttaggatcaatgaatttttcttcgaacttcttaatttcatctggttttaagaaataacaattccaagacttaaattcatcttttacttcgttatagatatcctcatcaactactacagaattttcggaggaacaaatcataccattatcaaaagttttagagaggacaatatcatagacggattctggaatattggcggtcttttcaatatatgaaggaccattacctggaccaacaccgattgcaggtttaccagatgaataagctgccttaaccattccaggaccaccagtagctaaaatagtttgaacatttggatgattcattaaagtacttgttgcttcaagacttggatattcgatccattgaatagcatctttaggagcaccagctttaattgctgcttctcgaataatttcaccagtttttacacaactcttttgtgcttgtgggtggaagccaaaaataatagcatttctagtttttaaagcaagcatagctttaaaaattacagttgaggttgggttagtaacgggagttactccagcaattacgcctttaggttctgcaattttaactaattgtttttctttatcttcttcaataacaccaacagttttttcatgacgaagactattccaaatgttttcactggcaaacatatttttaatagtcttatcttctactactccacgaccagtttcttcaacagccatttttgcaagtaaataactattctgttcccctgcacttgcgatagcttcacaaattttatcaacttgttcttgatcaaaattggccatctcatctaaagcaacatgggctttttctacatagccatcaatcattttatttacatcaattgctttttcttcttttgtcgcctttttatcttgcaccatttaattgggcctcctactcggaaatctaggcatatttttttgaacaatgacagtatagtccttatatccaacacttgtaaatgactttgtgcatctttttacaaattcacaatatgataaaaagtaagaaataactgttttcaataatgttatcggttacattttttataatattgaaaaatatttcacaaaagtatcaagtaatttttttattcataatcttataaaaaatcttaaacactatacgttttatcagttattatagatttttatgttaaaattttaataaactatgaaaggagttttatattttaatgtcaaaaaatagctcagaatcatctgaggttaaaactatgaaacggagtttgacaaatgcccatattcaactaattgcattagggggaacaattggaacaggactatttctaggagttggaaatagtattgagctagctggtcctgcagtaattttcatctattgcttagttggattctttctttttctgttaatgagagcactcggagaactgatactttcagatattaagaaaaatacctatattgattttatttcagaatacttaggaaaaagtattggaacaacaacaggatatttatattggttcagttggttgactctcgctatggcagaaattactgccctaggaatttattttcaatattggtggcccaacctgcaaagttggattcccggattaattactttattagtactattaggtattaatctaatttcagcacgggtatttggaaacttagaatttagttttgcaattattaaaattgtaacaattattgcatttgttattcttgtcttctacctattaattacaaattcttcaacaaagtatgggcatgttagctggaataacatgatgattgatggcggtattttcgccaaaggtcctaaaggttttttattaggttttcaaatggtaatctttagtttcatcggtgttgagttaattggtttaactgctgctgaagcaaaagaaccaaagaaaactattacacgggctattgaccaactgcctgttcgaattattttattttatgtgcttgcaattctaagtatcttattagcaattccttggacaaaggtttcaacttcaagttcaccattcgttcaagcattaggtgcaacaggaattaaaaatgcaggttcaataattaattttgttgttataagtgcagccatttcatcaactaatagctttatctatagtgcgggccgtctattattttcaataaattacaatggtaaaaacaaaatcagtaagcatttaggtaagttggatcatcgacaattacctaaaaatgctttagtattctcaacagttttaattgcattagcacctcttttaaatctctttttaaaggatgcttttacctttatttctgccactgcaacgagtatgtttttattaatttggtcaattatgatcgtgactcatatgacttaccgtaaaaagacaccaaagaatgaacttccaacatttagaatgccgttatatccaatatcagatatagcagtactaatattttttatagcaatgattattgtgttactaatatttccaaattatcgaattccaatgataagtgcaggaataatttttacagttttagtatgtctaactcactttatacagaaaaaaagtaattaatattaaatcctctagttaagaaaactagaggattttttcatgaaaaataataactatacaaaaaaggaagaacaaagataattctcttcgttcttcctttaactcatcactttactccggctgtcagactcgaactgacgacaacctgattaacagtcaggtgctctaccaactgagctaagccggaatattaaaaaagagcacggcgactgcctaccctcgcaggcagtttcccaccaactactctcggcgttaagaagcttaacttctgtgttcggcatgggaacaggtgtatccttcttgccatcgccaccgtactctttctgagcttttacactcaaaactgaatataatctctagcctttaaacctttgagctttggtcaagtgctcgactgattagtactagtccgctccacatatcgctatgcttccactcctagcctatctacctcatcgtctttaaggtgtcttactgctttcgcatcggaaatctcatcttgaggggggcttcgcacttagatgctttcagcgcttatcccttccatacatagctacccagcgatgcctttggcaagacaactggtacaccagcggtatgtccatcccggtcctctcgtactaaggacagctcctctcaaatttcctacgcccacgacggatagggaccgaactgtctcacgacgttctgaacccagctcgcgtgccgctttaatgggcgaacagcccaacccttgggaccgacttcagccccaggatgcgacgagccgacatcgaggtgccaaacctccccgtcgatgtgaactcttgggggagataagcctgttatccccagggtagcttttatccgttgagtgatggcctttccatgcagtaccaccagatcactaagcccgactttcgtccctgctcgagttgtagctctcgcagtcaagctcccttatacctttacactctgcgaatgatttccaaccattctgagggaacctttgggcgcctccgttacactttaggaggcgaccgccccagtcaaactgcccacctgacactgtcctccagaacgctcagctctgtgagttagaggatccatcaaacaagggtagtatcccaacattgcctccggtaagactagcgtcctactttctctggctcctacctatcctgtacatgtttaacaaatactcaatatcaagctacagtaaagctccatggggtctttccgtcctgtcgcgggtaacccgcatcttcacgggtattataatttcaccgagtctctcgttgagacagtgcccaaatcattacacctttcgtgcaggtcggaacttacccgacaaggaatttcgctaccttaggaccgttatagttacggccgccgtttactggggcttcaattcaaaccttcgcttacgctaagctctcctcttaaccttccagcaccgggcaggtgtcagcacctatacgtcatcttacgattttgcagatacctgtgtttttgataaacagttgtttgggcctattcactgcggctgatattttactatcagcaccccttctcccgaagttacggggtcattttgccgagttccttaacgagagttctctcgctcacctgagtgttctccactcgactacctgtgtcggtttgcggtacgggtaaaattgttctggctagaagcttttcttggcagtgtgacatcatgaccttcgctacttttatttcgctccgcatcacagcttgaaatctaaagacaagcatttgactcatcttttttcttactgcttgcacatgtatttccagcaacatgcgtcattagcctcctgcgtccctcctttgctcatatcgaacaatttcagtacaggaatttctacctgttgtccatcggctacgcctctcggccttaccttaggtcccgacttaccctgggcggacgagcctgccccaggaaaccttagtctttcggcggataggattctcacctatctttcgctactcataccggcattctcacttctaagcgctccattagtcctctcgatctaacttcgccgcacttagaacgctctcctaccacgcatataatatatgcatccacagtttcggtactatgcttagccccggtacattttcggcgcagcgtcactcgactagtgagctattacgcactctttaaatggtggctgcttctaagccaacatcctagttgtctacgcaactccacatccttttccacttagcatagatttggggaccttaactggtgatctgggctgtttccctttcgactacggatcttatcactcgcagtctgactcccgtgcattgatatctggcattcggagtttatctggattcagtaacccctgacgggcccctagtccaaacagcgctctacctccattatcattcacacgaggctagccctaaagctatttcggagagaaccagctatctccaagttcgtttggaatttcaccgctacccacaactcatccccgcgatttttaactcacgtgggttcggtcctccagcgtgttttaccacgccttcaacctggtcatgggtaggtcacttggtttcgggtctacatcatgatactctttcgccctattcagactcgctttcgctccggctccgtcttttctgacttaaccttgcaccataacgtaactcgccggttcattctacaaaaggcacgccattacactttaatgtgctctgactacttgtaggcacacggtttcaggttctctttcactccccttccggggttcttttcacctttccctcacggtactggttcactatcggtcactagttagtatttagccttgcgagatggtcctcgcggtttcaatcgggattcctcgtgtcccgacctactcaggatcctgctaagtctctccgcaatttcgcgtacggggctctcaccctctctggcttatctttccagataattctgctatcacttcaagtactatatcgcagtcctacaaccccaactggcaagccagttggtttgggctctttcctgttcgctcgccgctacttgggaaatcgatttttctttctcttcctgcagctacttagatgtttcagttcactgcgtcttccttcattaaccttaacagttaatgataatacctcgcggtattgggttcccccattcggatatctccggatcattgcttacttactgctccccgaagcctttcgtggttcgtcacgtccttcatcggcttctagtgccaaggcattcaccatgcgcccttttctacttgacctatttcaagttgagtttctctctcttctcggtcgctcttcaatctgttttttcgattgtctcggttttttgcttttgattatattcagttttcaatgtactagctcttgaggtaataccctcaaaactaaacaaagtttctcagtgtgcttccgcttggctttctcgatgacttctcttagtgctctcgcactctccatcatctttcgccttccttagaaaggaggtgatccagccgcaggttctcctacggctaccttgttacgacttcaccctaatcatctgtcctaccttagacggctgactcctataaaggttatcccaccggctttgggtgttacagactctcatggtgtgacgggcggtgtgtacaaggcccgggaacgtattcaccgcggcgtgctgatccgcgattactagcgattccagcttcgtgtaggcgagttgcagcctacagtccgaactgagaacggctttaagagatccgcttgccttcgcaggttcgcttctcgttgtaccgtccattgtagcacgtgtgtagcccaggtcataaggggcatgatgacttgacgtcatccccaccttcctccggtttgtcaccggcagtctcattagagtgcccaacttaatgatggcaactaatgacaagggttgcgctcgttgcgggacttaacccaacatctcacgacacgagctgacgacagccatgcaccacctgtctcagcgtccccgaagggaacacctaatctcttaggtttgcactggatgtcaagacctggtaaggttcttcgcgttgcttcgaattaaaccacatgctccaccgcttgtgcgggcccccgtcaattcctttgagtttcaaccttgcggtcgtactccccaggcggagtgcttaatgcgttagctgcagcactgagaggcggaaacctcccaacacttagcactcatcgtttacggcatggactaccagggtatctaatcctgttcgctacccatgctttcgagcctcagcgtcagttgcagaccagagagccgccttcgccactggtgttcttccatatatctacgcattccaccgctacacatggagttccactctcctcttctgcactcaagttcaacagtttctgatgcaattctccggttgagccgaaggctttcacatcagacttattgaaccgcctgcactcgctttacgcccaataaatccggacaacgcttgccacctacgtattaccgcggctgctggcacgtagttagccgtgactttctaagtaattaccgtcaaataaaggccagttactacctctatctttcttcactaccaacagagctttacgagccgaaacccttcttcactcacgcggcgttgctccatcagactttcgtccattgtggaagattccctactgctgcctcccgtaggagtttgggccgtgtctcagtcccaatgtggccgatcagtctctcaactcggctatgcatcattgccttggtaagccgttaccttaccaactagctaatgcaccgcaggtccatccaagagtgatagcagaaccatctttcaaactctagacatgcgtctagtgttgttatccggtattagcatctgtttccaggtgttatcccagtctcttgggcaggttacccacgtgttactcacccgtccgccgctcgcttgtatctagtttcatttagtgcaagcactaaaatcatctaggcaagctcgctcgacttgcatgtattaggcacgccgccagcgttcgtcctgagccaggatcaaactctcattttccttttgaaaatgagctttttatcgtttagctctaaaactttctttgagttatctcaaatttattgcttgcgaattgacttcgcttttgtttgggatttttatatcccgcacactttcagcgaaactttgttcagttttcaaggtactaccgttgtcatgtgacaacttttatattatatcatgtcttttaagctttgacaagaacttttttaattttctcatctctctcaaatgacagctttataatattatcatcttttgctcgctttggcaagctttttttgaacttttttatttgctcttttcgcttacctcaaacagcatgtattactttacagattttaatcaaaggaaaataaaatgcctcattaaggtagttaatgaagcatatctgtaaagcggagattgagagattcgaaccctcgcgccggtataaaccgacctacacccttagcaggggcgcctcttcagccacttgagtaaatctccaatgggcctaaatggacttgaaccatcgacctcacgcttatcaggcgtgcgctctaaccagctgagctataggcccctttcctttgaagcgggtaacgagaatcggactcgcgactaaagcttggaaggctttcgttttaccactaaactatacccgcaacttcttgcttcctaatggcgcgagacggaatcgaaccgccgacacaaggagcttcaatcctttgctctaccaactgagctatcgagccattacggtccctaccggattcggaccggtgatctcctccgtgacagggaggcgtgataacccctacaccaagggaccatattgcgggaacaggatttgaacctatgaccttcgggttatgagcccgacgagctaccagactgctccatcccgcgatgtttttatataaaaaaagccaagatcctatggaccttgtaggactcgaacctacgacccgacggttatgagccgtctgctctaaccaactgagctaaaggtccaagtttacctctatagcggcgggggggatcgaaccctcgacctcccgggtatgaaccggacgctctagccagctgagctacaccgccatctgtaacttccttcttattaagctacaatcgggaagacaggattcgaacctgcgaccccctggtcccaaaccaggtgctctaccaaactgagccacttcccgaagtgtgcaccctgaaggatttgaaccttcaaccttctgattcgtagtcagacactctatccagttgcgctaagggtgcatcattatatgccgaggaccggaatcgaaccggtacggttgtcaccaaccgcgggattttaagtcccgtgcgtctgccagttccgccaccccggcatgataatgataagcggaagacgggattcgaacccgcgacccccaccatggcaaggtggtgttctaccactgaactacttccgcatttttattcaatttttatgccgattaaaggactcgaaccttcgaccccctgtttacaagacagatgctctaccaactgagctaaatcggcatggtacgggtggtgggacttgaacccacacgtccgaaaacactagaacctaaatctagcgcgtctgccaattccgccacacccgcttgagttttttctgggccaatgagtcgtggcaggctcgaactgccgaccctctgattaaaagtcagatgctctaccaactgagctaacgactcaatggaggatacagggctcgaacctgtgacctcctgcttgtaaggcagatgctctcccagctgagctaatcctccatttagcacggcgactgcctaccctcgcaggcagtttcccaccaactactctcggcgttaagaagcttaacttctgtgttcggcatgggaacaggtgtatccttcttgccatcgccaccgtactctttctgagcttttacactcaaaactgaatataatctctagcctttaaacctttgagctttggtcaagtgctcgactgattagtactagtccgctccacatatcgctatgcttccactcctagcctatctacctcatcgtctttaaggtgtcttactgctttcgcatcggaaatctcatcttgaggggggcttcgcacttagatgctttcagcgcttatcccttccatacatagctacccagcgatgcctttggcaagacaactggtacaccagcggtatgtccatcccggtcctctcgtactaaggacagctcctctcaaatttcctacgcccacgacggatagggaccgaactgtctcacgacgttctgaacccagctcgcgtgccgctttaatgggcgaacagcccaacccttgggaccgacttcagccccaggatgcgacgagccgacatcgaggtgccaaacctccccgtcgatgtgaactcttgggggagataagcctgttatccccagggtagcttttatccgttgagtgatggcctttccatgcagtaccaccagatcactaagcccgactttcgtccctgctcgagttgtagctctcgcagtcaagctcccttatacctttacactctgcgaatgatttccaaccattctgagggaacctttgggcgcctccgttacactttaggaggcgaccgccccagtcaaactgcccacctgacactgtcctccagaacgctcagctctgtgagttagaggatccatcaaacaagggtagtatcccaacattgcctccggtaagactagcgtcctactttctctggctcctacctatcctgtacatgtttaacaaatactcaatatcaagctacagtaaagctccatggggtctttccgtcctgtcgcgggtaacccgcatcttcacgggtattataatttcaccgagtctctcgttgagacagtgcccaaatcattacacctttcgtgcaggtcggaacttacccgacaaggaatttcgctaccttaggaccgttatagttacggccgccgtttactggggcttcaattcaaaccttcgcttacgctaagctctcctcttaaccttccagcaccgggcaggtgtcagcacctatacgtcatcttacgattttgcagatacctgtgtttttgataaacagttgtttgggcctattcactgcggctgatattttactatcagcaccccttctcccgaagttacggggtcattttgccgagttccttaacgagagttctctcgctcacctgagtgttctccactcgactacctgtgtcggtttgcggtacgggtaaaattgttctggctagaagcttttcttggcagtgtgacatcatgaccttcgctacttttatttcgctccgcatcacagcttgaaatctaaagacaagcatttgactcatcttttttcttactgcttgcacatgtatttccagcaacatgcgtcattagcctcctgcgtccctcctttgctcatatcgaacaatttcagtacaggaatttctacctgttgtccatcggctacgcctctcggccttaccttaggtcccgacttaccctgggcggacgagcctgccccaggaaaccttagtctttcggcggataggattctcacctatctttcgctactcataccggcattctcacttctaagcgctccattagtcctctcgatctaacttcgccgcacttagaacgctctcctaccacgcatataatatatgcatccacagtttcggtactatgcttagccccggtacattttcggcgcagcgtcactcgactagtgagctattacgcactctttaaatggtggctgcttctaagccaacatcctagttgtctacgcaactccacatccttttccacttagcatagatttggggaccttaactggtgatctgggctgtttccctttcgactacggatcttatcactcgcagtctgactcccgtgcattgatatctggcattcggagtttatctggattcagtaacccctgacgggcccctagtccaaacagcgctctacctccattatcattcacacgaggctagccctaaagctatttcggagagaaccagctatctccaagttcgtttggaatttcaccgctacccacaactcatccccgcgatttttaactcacgtgggttcggtcctccagcgtgttttaccacgccttcaacctggtcatgggtaggtcacttggtttcgggtctacatcatgatactctttcgccctattcagactcgctttcgctccggctccgtcttttctgacttaaccttgcaccataacgtaactcgccggttcattctacaaaaggcacgccattacactttaatgtgctctgactacttgtaggcacacggtttcaggttctctttcactccccttccggggttcttttcacctttccctcacggtactggttcactatcggtcactagttagtatttagccttgcgagatggtcctcgcggtttcaatcgggattcctcgtgtcccgacctactcaggatcctgctaagtctctccgcaatttcgcgtacggggctctcaccctctctggcttatctttccagataattctgctatcacttcaagtactatatcgcagtcctacaaccccaactggcaagccagttggtttgggctctttcctgttcgctcgccgctacttgggaaatcgatttttctttctcttcctgcagctacttagatgtttcagttcactgcgtcttccttcattaaccttaacagttaatgataatacctcgcggtattgggttcccccattcggatatctccggatcattgcttacttactgctccccgaagcctttcgtggttcgtcacgtccttcatcggcttctagtgccaaggcattcaccatgcgcccttttctacttgacctatttcaagttgagtttctctctcttctcggtcgctcttcaatctgttttttcgattgtctcggttttttgcttttgattatattcagttttcaatgtactagctcttgaggtaataccctcaaaactaaacaaagtttctcagtgtgcttccgcttggctttctcgatgacttctcttagtgctctcgcactctccatcatctttcgccttccttagaaaggaggtgatccagccgcaggttctcctacggctaccttgttacgacttcaccctaatcatctgtcctaccttagacggctgactcctataaaggttatcccaccggctttgggtgttacagactctcatggtgtgacgggcggtgtgtacaaggcccgggaacgtattcaccgcggcgtgctgatccgcgattactagcgattccagcttcgtgtaggcgagttgcagcctacagtccgaactgagaacggctttaagagatccgcttgccttcgcaggttcgcttctcgttgtaccgtccattgtagcacgtgtgtagcccaggtcataaggggcatgatgacttgacgtcatccccaccttcctccggtttgtcaccggcagtctcattagagtgcccaacttaatgatggcaactaatgacaagggttgcgctcgttgcgggacttaacccaacatctcacgacacgagctgacgacagccatgcaccacctgtctcagcgtccccgaagggaacacctaatctcttaggtttgcactggatgtcaagacctggtaaggttcttcgcgttgcttcgaattaaaccacatgctccaccgcttgtgcgggcccccgtcaattcctttgagtttcaaccttgcggtcgtactccccaggcggagtgcttaatgcgttagctgcagcactgagaggcggaaacctcccaacacttagcactcatcgtttacggcatggactaccagggtatctaatcctgttcgctacccatgctttcgagcctcagcgtcagttgcagaccagagagccgccttcgccactggtgttcttccatatatctacgcattccaccgctacacatggagttccactctcctcttctgcactcaagttcaacagtttctgatgcaattctccggttgagccgaaggctttcacatcagacttattgaaccgcctgcactcgctttacgcccaataaatccggacaacgcttgccacctacgtattaccgcggctgctggcacgtagttagccgtgactttctaagtaattaccgtcaaataaaggccagttactacctctatctttcttcactaccaacagagctttacgagccgaaacccttcttcactcacgcggcgttgctccatcagactttcgtccattgtggaagattccctactgctgcctcccgtaggagtttgggccgtgtctcagtcccaatgtggccgatcagtctctcaactcggctatgcatcattgccttggtaagccgttaccttaccaactagctaatgcaccgcaggtccatccaagagtgatagcagaaccatctttcaaactctagacatgcgtctagtgttgttatccggtattagcatctgtttccaggtgttatcccagtctcttgggcaggttacccacgtgttactcacccgtccgccgctcgcttgtatctagtttcatttagtgcaagcactaaaatcatctaggcaagctcgctcgacttgcatgtattaggcacgccgccagcgttcgtcctgagccaggatcaaactctcattttccttttgaaaatgagctttttatcgtttagctctaaaactttctttgagttatctcaaatttattgcttgcgaattgacttcgcttttgtttgggatttttatatcccgcacactttcagcgaaactttgttcagttttcaaggtactaccgttgtcatgtgacaacttttatattatatcatgtcttttaagctttgacaagaacttttttaattttctcatctctctcaaattacagctttataatattatcatcttttgctcgctttggcaagctttttttgaacttttttatttgttcttttcgcttgcctcaaacagcatgtattactttacaggctttttcacttttcgtcaacatggttttgaataaaaatatatattgcgaatattcatttaattaataatttaattgttcagatttatcatttttcattcttattttaattgagatttaagtcttaaaattcggatataaaaaaattgtgttaagtataatcacttaacacaatttttaattattttttcaattctggggcatctgtcttaaaatcactttgagttgtctttttgccattctgataccagacactattcttactcttcttctcgagcctttttcaatcgttttaatgaatcagatttcttatatgaataattctttctcttcacatattcaaatccatctggcttatagaagcgcaaaagatttcctgtaattactcggtctgataaggagagctcggtcgttactgtattagaaatggatgctaattgggcctttactttcttgcttggatgagttattcgctttcctgattgcgtgtagtaataacttccttctactttactatattttggagtaataaagtcaccatttcgctgggcaacaatctgtggagcatttttagccaaaagactatgtccaaactgaatcatattttggtcattaattcctaataaattaaataaggttggtctaacgtcaatctcgccaccataggtatgattaataccacccttaagtccaggcatgtggaacattaatggtacccgttggaattggagattatcaaaattattaaagctatctttatccaataattgggcagacgccttatggtgatttccagaaattccgtagtgatctccataaagcataattagagtattcttctctaaaccagatttcttcagatagctcatcaattctccaattgcttgatcaagataatgagcagtttgaacatatccatctactgttttatcacccgtatcagttttatcaatggattgattttttttatctaaatcatatggatagtggttcgttaccgtaatcatctttaaataaaatggctgtggtaagtgctccatatatttaatcgactgatcaaagaaaagcttatctttaattccatatcctaagtaatatccctttttattttgataataagataaaggcatgaaataatcgtagccaaaagacttataagcattatcacgattccagaatgaacctgccccaccatgcataactgcactagtgtagccagccttttgacctagtatagctggagcactttcaaaagtgttagatgttccataacttgacatagcagatccggattgtaaaccaaaaatagagttttctagcatcatttcagcatcggaagtcttaccctgtcctacttgattaaagaaattatcaaaactaatagtatcgttagcatgatacaacttattcaaattaggtgtaacttcttttccatgccacttatagtcaattaaaaattgctggaaactctctaagtgaattaccaatacgtttttattctttgctacaccataatactcagggttaggtgcaatataatttttcttgatataagactgaacagtttttagatcactatggtttgctttagccataattgcattattttgagcagtttttactccgtcgtatactgcaaaagcattcaatcctaaatatttaacaatatagttattatcaaaagttctagttaataaaccaggacgatccttttgtgccatagttaaattagtaccaatcagtactacagctaagccttcaattaaaagtgaaacctttaattttagacgtcgaacatcaattttaaaaactttaaaagctattagtagaacaatgataactacatctaaaaatactaaaaaatctgttccttttgtgatgcccgcaatactttttcctaaattatcagaagtagatccggatgttttaatgatagaagtagataaaaaatcagaaaattctcgataatataatatatttgaaaatagccaaagagataaaagaaaatcaattatgaccataatccagtaggatttcctacccttaaaaaataaaccaattccaattaataaaatagcagttggcagtggatttatcagtagcaaaaaattttgcattgagcccactacacctaaattaaactttgttatataggttaaatatgtttttatccaaaaaaatacaacaactacagtgaaaaagcctaatttagttttagttaaccaattatatgatgcttttaggcgtcccatctaagtcctcctcaactttgttctttcatgatattactactaaaaaatggttttgataaattaaaatagcaaatttaaggaattttaatgactttttactttcttgggcttaaagagccaaccgaatatccataaaatcattccaaaaaagtaggtagtaaaacgccataagaacatccctagagtcaacaaaatatttgaatgaataaaagtagaaaacaatgtctgaaaactaaattctgctccgccagatgctcctggaattggaacaattgccataaacatgataatcataatgttcatctgtgtaacgtctagccaagaaggtgttaaatttaacgctaacaagatcaagtacggaattgaatagaaacatagaagttgaccaatagtcaaaatactggcacctaataattttttcttttcacgttttaagttctgtccttctgcataaaaagtttcaattttctccatcgtattcttacgccatttttcaacagtatttttattcataaatttttccagtaaatccatgagccaattagtagtattttttgtccatcgatatgcaaacataattgctaatagaaaaattatggaacttacatgaagaataaaaccaattaaaataaacaaggctaaccctgaaaatttggttactaccatatgaaaaccaaaaataattgtcgatacgtacgcaaataaaacgcaaatttgataaattataaatttcatcaacagaatagatgtcgcgcgtccaccttctattcccatctgaatcatggctactaactgagaaggttgaccaccggtagacaagggggttatcgcattaaataaagcttgaataattggaattctgaaaaaagaccatgcagagcgatgtggatctccctttttatgctctaaaatccaaataatagcagcttcacagacatacgacaaaaccattaccaataaaactaacagtaagaaagttaaatttaattttttacttgctccccataatgccttaattggtgttttccgtaattcttgccaaataacaaagccactaattaaaagaacaatcagcatccctataaaatgttttttgttcattatttgatttgtcctaactttctaccaatttcatattgttccatgtaaaagtcatgccatattttagcaagatggtcttcagaatattcttgactggctcgagcagataaatcttgatacttctttaatttttcaggatttgatactacggatttaatttgagcgtttaactcagtaaaatccttgcctttcatataatacccgtcaataatagcttgatataaatccaaatcacgtaataaaacaggagtattacatgaaaaagcttctaaaactgacattggaaataattcatcgaaagatggaagtaaaaataagtcagcaatgtttaaatagctaactaattcttctcgtggcacaataccagtaaatttcaggttttttggaggattatcaattaacttcttaaaatgagcatatccatccgtcattttaccgaatgagaatccaccagcccaaataaattgaatatctggattggcttctgctaacttcgcaaagtcatccacaccttttctttcttgaacttgtccatctccgacaattacaaacttatctatcggaatatgcaatttattcctaaaggcgtttttttgtacttgactttgctcataaaattcactttttgctacaaaattaggaatgtatttcactttttcttcgcttattccgtacttcactaatttatcaataaagattggattaactactactatctgatccattcttttataaaaatcaataacgtacttatagaagatactttttgctggttcagggagcttaacagatccctctaaggtttccggcagaaaatgcacatatccaatttttcttccacgactaggtaaaaaactattagcaaaatatgtaggatttatagtatggtaatgcgttaaatcacttgctccatatttattaatagttacataaaaatcttctactaagcgggacctaagtaagcgcactaactctttatacgcagatcccacaccctgtccctgaactgaatccgcctgggaaaacatattaattctaatcataatttacctcagttgttcgtttattttgaattgcatcttgataaaaatcttctattttatgtgcaaaagtagctgctgatacatctaccaatttatttttctttatattttcaggaatggtaaatcgatcttcttttaaataatcaagaatctcatttttcatctcatcctttgttttaaaggtgcagcctaactccttattatcaaaaacattctccgtgtaatcggtactgtacactacactttttgttccagctgctaatgcctcaatataggttaaaccttgcgtttcagtatcacttgcagatacgaataagtccgccatacgataataatttccaacatcactatgttcaacactacccgcgaaagttacatagtcttctaaagaaagtcgagtaacttgatcttttaatggctgtacatcaggaccatcgccggcaattacaaactttacgttaggctctttttctaaaatttcaggtaaaacatctaaaatttgatctattttcttttcagctgctaccctacttagcgtgagaataactttatcttttgaactaagccccaattccttccggacatctcgacggggattttcattgatagctgttaaatcaactcctgttggaataatacgcattggaattgtaactccatatcgcctcaatgtttcttttacacgctgacttggtgcaaccactccatccatcttatgtagataggccttcgtaatctgtttaacgtgatatggctttaataggtgtccatttaatacataatgtaagtagtcttcatacatagtatggtaagtatgaatagcaggaatatctaacgaatgcgcaacgtattttccaatcatacccattgcaaactcggtttgagtatgcacaatgtctaattttacttccttagcaattttcgttgcctgaaataaacctctaactgcaattcttctatccgtaaaagagacaaaaggtacactactaactctgaaaatatttggctcaatagtcccctttcctaaatgaggatcagttgtagtaaaaatgaagacagaatgtccatctgcttcaagagaattttttaaagtttgaattgaagttgcgaccccagaaagctgaggaaaataagtatcggtaaataacccaatattcatataaaaatacctccattaaagaacattataaagttagtagaaaggagttgcaattttggataaaaaaaagacgtgagaattaactcacgtctttttgccagaatgtctgaataaatagcggtgatcggggtcgaaccgatacgtcccaggggacaccagattttgagtctgacgcgtctgccaattccgccacaccgccataaatgaaattaatcaggaaattcaggcgaaggcggtgatcggatttgaaccgatgattagggttttgcagacccgtgccttaccacttggctacaccgccaacctctgatcattaacaaattgggatagttggattcgaaccaacgcatgatgaagtcaaagtccattgccttaccgcttggctatatcccaatgttagggcggaatgtggggatcgaacccacgcatgccggatccacaaaccggtgtgttaaccacttcaccaattccgccataatattaaaaacagggatagtaggaattgaacccacactagcggttttggagaccgatgtactacctttatacgatatccctatttaaatggaggccagtggattcgaaccaccgaactcagagagagcggttttacagaccgccgcgtttagccacttcgctaggcctccagaatggcgcgagacggaatcgaaccgccgacacaaggagcttcaatcctttgctctaccaactgagctatcgagccatttacggtccctaccggactcgaaccggtgatctcctccgtgacagggaggcgtgataaccactacactaagggaccatattgcgggaataggatttgaacctatgaccttcgggttatgagcccgacgagctaccagactgctccatcccgcgatgattaaggaggatgtgggattcggacccacgcgcgggcagaacccgcctgacggttttcaagaccgttcccttcagccggacttgggtaatcctccatttataccatcttttaatatggtaatgacccgtacgagatttgaactcatgttaccgccgtgaaagggcggtgtcttaaccacttgaccaacgggtcatacgtttttaacgtacttgttaatcatacctgatttagaaagtgatgtcaacaacttttttcaaaaactttttttgaagtgttgctttttcttactctccgcatcagcaataactatattactaaaaacattctaactatgcaacccctaattttaattttttttactttatttctttttttatctctttaagcctatatggtgctacactaagcgtatacggaggtgtttttatgtctaatgaacgatgtattgttgacaataaaaaaggtaaaaaactaattaaattagctgatggaaatatgatttgtgaagatcatgcaaaacttactccttggcaaagagaagaattaattgaaaaagatgcaaatcaagttaatgagtatatagataaaatgactaatacccatttagctgcatatggcttagaaaatacggaagcatcatacaagcctcttcttcatagagcggctcaaagtgatctaatggaaaatacttccccagaggatacattaaggcttcaaaactggatcttaatcaagcaaaatgcagaaataattaacctgcttaaagaattaaatacaagaaactagctagtccatataactatagacacattcgttccatctgaaccatgtgtcttttttagactagcaaaaatacgaccttgaaatatgtaaaaatcgctctgtaaactctttatttcattttaaagccaaattcctcctcaggagcctttaaaagccatatagagaagatataaggctcattaccgcataaaggagattccactctaatttttcaagagacggctgctttccctcttttcggccgtataatagacacctaaattttctctgcttattacataactgaactttcgccgctctcttccccacaagggtcgtcttacttataatacggggactaaaaaactttcttagttcaatcaaggtaagtgcctggaagaaaactacgatttatctacttccaagactactttcgtataattcaattgcttttaatttagtttcaactgtatatttgtccatagcaaaatccccaggttgggtgtatggccaattctggggttaacttcatagttatttgattctttttctgtctattcatccatacacttgaacaaagtttttttatttttaaagatacaaaaaaacacactagtgacattactagtgtgtttactttaaagcggagattgagagattcgaaccctcgcgccggtataaaccgacctacacccttagcaggggcgcctcttcagccacttgagtaaatctccaatgggcctaaatggacttgaaccatcgacctcacgcttatcaggcgtgcgctctaaccagctgagctataggcccctttcctttgaagcgggtaacgagaatcggactcgcgactaaagcttggaaggctttcgttttaccactaaactatacccgcaacttcttgcttcctaatggcgcgagacggaatcgaaccgccgacacaaggagcttcaatcctttgctctaccaactgagctatcgagccattacggtccctaccggattcggaccggtgatctcctccgtgacagggaggcgtgataacccctacaccaagggaccatattgcgggaacaggatttgaacctatgaccttcgggttatgagcccgacgagctaccagactgctccatcccgcgatgtttttatataaaaaaagccaagatcctatggaccttgtaggactcgaacctacgacccgacggttatgagccgtctgctctaaccaactgagctaaaggtccaagtttacctctatagcggcgggggggatcgaaccctcgacctcccgggtatgaaccggacgctctagccagctgagctacaccgccatctgtaacttccttcttattaagctacaatcgggaagacaggattcgaacctgcgaccccctggtcccaaaccaggtgctctaccaaactgagccacttcccgaagtgtgcaccctgaaggatttgaaccttcaaccttctgattcgtagtcagacactctatccagttgcgctaagggtgcatcattatatgccgaggaccggaatcgaaccggtacggttgtcaccaaccgcgggattttaagtcccgtgcgtctgccagttccgccaccccggcatgataatgataagcggaagacgggattcgaacccgcgacccccaccatggcaaggtggtgttctaccactgaactacttccgcatttttattcaatttttatgccgattaaaggactcgaaccttcgaccccctgtttacaagacagatgctctaccaactgagctaaatcggcatggtacgggtggtgggacttgaacccacacgtccgaaaacactagaacctaaatctagcgcgtctgccaattccgccacacccgcttgagttttttctgggccaatgagtcgtggcaggctcgaactgccgaccctctgattaaaagtcagatgctctaccaactgagctaacgactcaatggaggatacagggctcgaacctgtgacctcctgcttgtaaggcagatgctctcccagctgagctaatcctccatttagcacggcgactgcctaccctcgcaggcagtttcccaccaactactctcggcgttaagaagcttaacttctgtgttcggcatgggaacaggtgtatccttcttgccatcgccaccgtactctttctgagcttttacactcaaaactgaatataatctctagcctttaaacctttgagctttggtcaagtgctcgactgattagtactagtccgctccacatatcgctatgcttccactcctagcctatctacctcatcgtctttaaggtgtcttactgctttcgcatcggaaatctcatcttgaggggggcttcgcacttagatgctttcagcgcttatcccttccatacatagctacccagcgatgcctttggcaagacaactggtacaccagcggtatgtccatcccggtcctctcgtactaaggacagctcctctcaaatttcctacgcccacgacggatagggaccgaactgtctcacgacgttctgaacccagctcgcgtgccgctttaatgggcgaacagcccaacccttgggaccgacttcagccccaggatgcgacgagccgacatcgaggtgccaaacctccccgtcgatgtgaactcttgggggagataagcctgttatccccagggtagcttttatccgttgagtgatggcctttccatgcagtaccaccagatcactaagcccgactttcgtccctgctcgagttgtagctctcgcagtcaagctcccttatacctttacactctgcgaatgatttccaaccattctgagggaacctttgggcgcctccgttacactttaggaggcgaccgccccagtcaaactgcccacctgacactgtcctccagaacgctcagctctgtgagttagaggatccatcaaacaagggtagtatcccaacattgcctccggtaagactagcgtcctactttctctggctcctacctatcctgtacatgtttaacaaatactcaatatcaagctacagtaaagctccatggggtctttccgtcctgtcgcgggtaacccgcatcttcacgggtattataatttcaccgagtctctcgttgagacagtgcccaaatcattacacctttcgtgcaggtcggaacttacccgacaaggaatttcgctaccttaggaccgttatagttacggccgccgtttactggggcttcaattcaaaccttcgcttacgctaagctctcctcttaaccttccagcaccgggcaggtgtcagcacctatacgtcatcttacgattttgcagatacctgtgtttttgataaacagttgtttgggcctattcactgcggctgatattttactatcagcaccccttctcccgaagttacggggtcattttgccgagttccttaacgagagttctctcgctcacctgagtgttctccactcgactacctgtgtcggtttgcggtacgggtaaaattgttctggctagaagcttttcttggcagtgtgacatcatgaccttcgctacttttatttcgctccgcatcacagcttgaaatctaaagacaagcatttgactcatcttttttcttactgcttgcacatgtatttccagcaacatgcgtcattagcctcctgcgtccctcctttgctcatatcgaacaatttcagtacaggaatttctacctgttgtccatcggctacgcctctcggccttaccttaggtcccgacttaccctgggcggacgagcctgccccaggaaaccttagtctttcggcggataggattctcacctatctttcgctactcataccggcattctcacttctaagcgctccattagtcctctcgatctaacttcgccgcacttagaacgctctcctaccacgcatataatatatgcatccacagtttcggtactatgcttagccccggtacattttcggcgcagcgtcactcgactagtgagctattacgcactctttaaatggtggctgcttctaagccaacatcctagttgtctacgcaactccacatccttttccacttagcatagatttggggaccttaactggtgatctgggctgtttccctttcgactacggatcttatcactcgcagtctgactcccgtgcattgatatctggcattcggagtttatctggattcagtaacccctgacgggcccctagtccaaacagcgctctacctccattatcattcacacgaggctagccctaaagctatttcggagagaaccagctatctccaagttcgtttggaatttcaccgctacccacaactcatccccgcgatttttaactcacgtgggttcggtcctccagcgtgttttaccacgccttcaacctggtcatgggtaggtcacttggtttcgggtctacatcatgatactctttcgccctattcagactcgctttcgctccggctccgtcttttctgacttaaccttgcaccataacgtaactcgccggttcattctacaaaaggcacgccattacactttaatgtgctctgactacttgtaggcacacggtttcaggttctctttcactccccttccggggttcttttcacctttccctcacggtactggttcactatcggtcactagttagtatttagccttgcgagatggtcctcgcggtttcaatcgggattcctcgtgtcccgacctactcaggatcctgctaagtctctccgcaatttcgcgtacggggctctcaccctctctggcttatctttccagataattctgctatcacttcaagtactatatcgcagtcctacaaccccaactggcaagccagttggtttgggctctttcctgttcgctcgccgctacttgggaaatcgatttttctttctcttcctgcagctacttagatgtttcagttcactgcgtcttccttcattaaccttaacagttaatgataatacctcgcggtattgggttcccccattcggatatctccggatcattgcttacttactgctccccgaagcctttcgtggttcgtcacgtccttcatcggcttctagtgccaaggcattcaccatgcgcccttttctacttgacctatttcaagttgagtttctctctcttctcggtcgctcttcaatctgttttttcgattgtctcggttttttgcttttgattatattcagttttcaatgtactagctcttgaggtaataccctcaaaactaaacaaagtttctcagtgtgcttccgcttggctttctcgatgacttctcttagtgctctcgcactctccatcatctttcgccttccttagaaaggaggtgatccagccgcaggttctcctacggctaccttgttacgacttcaccctaatcatctgtcctaccttagacggctgactcctataaaggttatcccaccggctttgggtgttacagactctcatggtgtgacgggcggtgtgtacaaggcccgggaacgtattcaccgcggcgtgctgatccgcgattactagcgattccagcttcgtgtaggcgagttgcagcctacagtccgaactgagaacggctttaagagatccgcttgccttcgcaggttcgcttctcgttgtaccgtccattgtagcacgtgtgtagcccaggtcataaggggcatgatgacttgacgtcatccccaccttcctccggtttgtcaccggcagtctcattagagtgcccaacttaatgatggcaactaatgacaagggttgcgctcgttgcgggacttaacccaacatctcacgacacgagctgacgacagccatgcaccacctgtctcagcgtccccgaagggaacacctaatctcttaggtttgcactggatgtcaagacctggtaaggttcttcgcgttgcttcgaattaaaccacatgctccaccgcttgtgcgggcccccgtcaattcctttgagtttcaaccttgcggtcgtactccccaggcggagtgcttaatgcgttagctgcagcactgagaggcggaaacctcccaacacttagcactcatcgtttacggcatggactaccagggtatctaatcctgttcgctacccatgctttcgagcctcagcgtcagttgcagaccagagagccgccttcgccactggtgttcttccatatatctacgcattccaccgctacacatggagttccactctcctcttctgcactcaagttcaacagtttctgatgcaattctccggttgagccgaaggctttcacatcagacttattgaaccgcctgcactcgctttacgcccaataaatccggacaacgcttgccacctacgtattaccgcggctgctggcacgtagttagccgtgactttctaagtaattaccgtcaaataaaggccagttactacctctatctttcttcactaccaacagagctttacgagccgaaacccttcttcactcacgcggcgttgctccatcagactttcgtccattgtggaagattccctactgctgcctcccgtaggagtttgggccgtgtctcagtcccaatgtggccgatcagtctctcaactcggctatgcatcattgccttggtaagccgttaccttaccaactagctaatgcaccgcaggtccatccaagagtgatagcagaaccatctttcaaactctagacatgcgtctagtgttgttatccggtattagcatctgtttccaggtgttatcccagtctcttgggcaggttacccacgtgttactcacccgtccgccgctcgcttgtatctagtttcatttagtgcaagcactaaaatcatctaggcaagctcgctcgacttgcatgtattaggcacgccgccagcgttcgtcctgagccaggatcaaactctcattttccttttgaaaatgagctttttatcgtttagctctaaaactttctttgagttatctcaaatttattgcttgcgaattgacttcgcttttgtttgggatttttatatcccgcacactttcagcgaaactttgttcagttttcaaggtactaccgttgtcatgtgacaacttttatattatatcatgtcttttaagctttgacaagaacttttttaattttctcatctctctcaaatgacagctttataatattatcatcttttgctcgctttgacaagctttttttgaacttttttatttgctcttttcgcttgcctcaaacagcatgtattactttacaggctttttcacttttcgtcaacccttttttgcaaaaaattagcaatatttttttagagtgctaatttcaagccttttctctcgtattttagatataaaaaaatggtattcttttgctatgttagcaattgaataccattcttactttattaaattttattcaccaaattttggctctttagtaataactttcattccatgcatatatggttgtaaagcttctggaacatttacagttccgtcttcgttttggtaattttccaaaatagcagctactgttctacctacagctagaccagaaccatttaaagtatgtgctaaatgaagtttaccattttcgtctctgtaacgaatcaaactacgacgtgcttggaagtcagtacagtttgaacaacttgaaatttcacgatacttatcttgtgctggcatccaaacttctagatcataagtttttgcactagtaaaacttgcatccccagttgaaagagcaacaacatgatatggtaaaccaagtttttgaagtaaatgttcagcattatgggttaatttttccaattcatcccatgaactttcttcgtcaacaatttttaccatttcaacttttctaaattcgtgcattctgattaatccacgagtgtcacgtccagctgatcccgcttcacttctaaatgctggagagaatgcagttacattaattggtaattgctctccatctaaaatcttgccacggaagtaattaactaatggtacttcagcagttggaattaaagttaaatcacgtggcttatcaggatcatcattatctacaattgtataaacatcttcagtaaacttagggaattgaccagttccttgcatagaagcatcgttaactaagtatggtggaattacttcagtatatccatctttagtattttcatctaagaagaagtttgaaactgcacgttcaagcaatgcacctgcacctttgtaataaacaaagcgggcacctgaaactttagcagcagtatcccagtctaaaatattcaattctgttccaatttcccagtgaggttttggttcaaaatcaagtttagtaggctcatgccacttacgcacttcttcattgtaactttcatcaggtccaataggatctgagtctgctgggaagttaggtaaacgaagtaagatatagttttgtttttgagttaaatcttctacttctttatctaaatccttaatttctttacctacttcacgcattgctttaatagcatcacttgcatcttctttattgcgtttagcttgagcaatttgatcagatacttcattacgcttttgctttaattgttcactcttagttaaagcttcacgtctttctttatcaatagctactaatttatctaattcctctggtttaattcctcgtgtagctaattttttctttgaccagtctaaattctctcgaattactttaatgtctaacatatttcctccttaaaaataaaacaaaaagccgactcatccctacacggggacgaatcgacttacacggttcgcggtaccacccacatttggttaaaaaataccacactcaaaaagcgataacggtgctaaccgtgtagaattacctacccacattcgaaatctggaaacgacttttttactcattcacaccaaccatgagctctctgaaactagtcttaggatttcatgtttatttgcattatatcatgccaatcctgtggtgttaacaaataatatttttcttgataattaaaaagtgaagaaaccattgaataatcagtggtatagacatatctaaaccctaatttttttaacaatttttgtgaatttgtattagaaacaaatgtacccgcccaaatttgattttgctctaattctttaaaagcaaaatcaataattagtcgtaaggcttcggtcattaaacccctgtgccaatattctttatctaacaaaaaacctaaatcttttgttagtaaaagaccattgtattcatctaatccacgttcatataattcaactaagccgattagacgattattttcttttagtactataccgtaactatagggacgtgcttgatattgaagggcactttttttggccgcatctaaatcttgtaaatattggtaacctgcacttttgtgataaatattatcctgtccccacttaagaagcgtaggagcatctttaggttcaatttttcttaaaataattctctcagtttctagcattacttgcctactaactttactaaccattttgcaccataaactaaccctaaactataggctgcaatggtccacggttttcctaataaaattatccataaatatgttgagaacttcatttcagttaatccagcaatcatacataaaatgtcatctggcgccattggcgcaataatacacagaccaaaaaaccaattaaattttttctgattagctgtccacttcatgtatttttcatacgtcttttcagaaactaaatgtaagataaagggtctaccataatgtctggccaagaagaataaaataatagatcctaaacatatcccgacataattataaataaagccccatattggaccaaaaaatattactcctccaagcagcgaaactccaccagggataatcggaattacaacttgtattatctgaattaatgtaaaaatcaaaggaccgataatttgcttgtctgctagataggccttcattttttcttggcttgtaaaaattcctaatctataccaataaatacttagcaaaattagaataattgtagtaacaatggtcaaaatattaattaatttacgactcgttttagtagacatttttctgccctccttggtatgttaaattaatgataacaaaaacaaggtaaaataggcgcactaacctaggaattaaacttaattataatgaaaataagatatgactcatcattaaaatttattctataatattagtgtgttataaaataactaagaggcatgactatggttgttataaaaaaagatataatttacgatgaaaataacaatttgaagactgatatctattttccaaatgatactacttcacaaacaaaactcttaatcttttggcatggcggaggatggtttgctggttctaaaaacgatgttaaagacctaggaataaaattcgcaaacgctggttttatgaccttaattcctgattatcgcttagcacctgaatttacttatccagctgcacatcaagatagtaagaaatttgttgaatggcttttagattctgattataccgatgatgatgatcaacaaaatattgtacaaattggtgcaagtgtcggcggtacactagctttgtatattgctggaatttacggttttcctacggttacgtggtcagcatcggtagacttctcgaactggatgaaaaatcatcaagatgttattccatcaagatatggtgccaatgagttaaaactaacaaatttatatgatatttttgaatcattctataaattttttgtaaaaacctatgctgggaaaaatgatcaagctattttaaaaaaaatggatgtcgaaaattatgatcttagccatttgggaaggctaaaaatgattaattctgctcatgaattagttccactaaatggtgttttaaaatttatcgactttttagctaacaatgatcatgaggttgaattattagtcattaaaggtcatcggcatgcaatggattacgccatggattatattgatgaatctttagattttttgtatcagacaatcaaggagaagaagaatgatcaacattaacaaatttgtttccattcgtaaaaaattaggtttgtctcaaactgaactatgcaatggaatttgtactcaatctacattaagtaaatttgaaaataatggccgtattccttctctaaaaattttaaatagtctgtgcgaccgaatgaatattaatgtagctgatatcatggacgttgactctaataaaaaaacatcccataaattatttgaggcggattttgctgttattcagcttgattttccaaaagttgctcaaattttaagcagtgttaataaggatgaattagtccgccaagaagatattcttcactattattatctgcgcggtctactagctttaaatttagatcatgctaaaactgacgcactttactactttaattcaattttagatgcaaacttatcaaaacgaaataaaatttattatcttcttgctctaaaaggatgtagtcaagtttatgacttacaagacgatgttcataaagcacgacattattatgacatcatcttgtcttcgatatctaatgttccgcttgaagatgaagactctttactacaatttctttctattctttgtaatggtggagaattttatggtcgtaatgacgattatgaacaatcggataaattattaaacatgggatacgatttatgcaaaaaacgacatgtaatttactttgctgctcgcattctttatcaattggcacaaaataatattgccgagaatggatcgccacaaaagactgctcaatatttgaatgattccgctgcctttgctcgtctgaataataatcatgttttactagaaaaaattaataagttagcttaaatctaatcacttctttttaatttcttactaaagagaagtgatttttatatacatctataagaaagcgctttataatatattatattgaaaagaggaaattttatgtctaaatatgaatcaattaatccatatacaaaccaattaattaaaagttatccaactgcaactcaagaagaaattgaacaagcacttgaaaccggagaaaaattatatctaacttggcataatcagctgccagctactagaagcgagttacttcacaagatagcaaataattttcaaaaacatcgcaaagaaatggcaaaaaccatgactttagaaatgggaaaattgtattgtgaatcacttgaagaagtagatctatgtataaatatttgtaactattatgctgataaagctcctgaaatgttagagcctactcctttagaaacagctttaggaaatgcctattatctaaaacaatctacaggtattatcatggcctgtgaaccatggaacttcccactttatcaagtaattagagtctttgctcctaattttatggttggaaatcccatcatcttaaagcatgctcataatgttcctggctcagcccaattaacagaagaaattattgaagaagctggtgctccaaaaggaagtctgcaaaacttattcctatcttatgatcaaattggcgatgttattgctgataaacgtgttcaaggcgttgcagtaactggttcagaacgtggtggtagtagtgtcgcagaagctgctggtaaaaatattaaaaagtcgacaatggagctaggcggaaatgatccatttattgttttggcagatgctgactctactgtattaaagaatgtactaagtgatgccagaacctataattgcggtcaagtctgcacctcttctaaacgaattattgttgttgaatcccgttatgacgaagtaatggatatcttgcaccatacttttgctggacttaaacctggtgatcctttagatgcagatactagtcttgcaccaatgaattctcaaagagctgctgataagttagctgagcaagttaaaaaaggaattgaacatggtgcagaagttgcttatcaatatcctgaaattaaaagttctggtgccttcttccggccaatgattttaactaatattgataagaagaatccattatttgatgaagagttgtttgggccagttgctgaagtattcaaggttaaaaacgaagaagaagcaattgctctagcaaataattcaagctttggtttaggatctagtgttatttctgaaaatagaactcatgcccaagaagttgcaagtgaaattgaaaccgggatgactgttattaacgggcgctggattaccgctcctgaattaccattcggtggtgttaaaaaatctggctatggtcgtgaacttagtgaactcggcttgatgtcatttgtaaacgaacatttagttattgacgtttcaaaataatttttaagtgtacaaaaaaggcttagatcaatattgatctaggcctttttaattttgtctcatactgcgaaaagcaactactgttaaaagaatacttgatacaaataataaatatgtcgaaactccaaaagaaattgcattcgcaacaatacgttgaatttcaatgctattggctactgtattattggtaataccaagaggagatccagcattcataaagatcaattctacagcacaaactattaaaacaattgattcaattaatgaaaggaagaaaactagcttcttattattcttaccatttttaatagttaagataatgattgcaattggtacaccaactaaaagtagccacatcccataaccaataaaaatatatttcccattaaatctaccaattgaaaggagcgccttagagatagatagagcttgatagccttgcatcattccagatgaaaacggaccgctaaaaaccaaaagtaagtttaaaactgcgattaagattactcctaattgagttgcagttcgtttttgcttaacaactttttttatagcttctggatcccgacctaatttatcatcaatcttttgacggtgagcccttactttgctctctccttcttcaaaagaattaactacatcggaaccaaccttattaacatgttctgtcaatcgttgatcgactgtatattgctcagttttctttcccttattcttatcagatactataaataaccaaattaataaggcaaagaagcaagaccatcctaaggatggagaaaaacttgttaaaatcaaaagaataattccaactacaaaaacaatcattgaatttacttgaatccaattaatcatagtagcaatggtagaattttgtttttttggctcaactttcttaacagagcgtgtttcttgtttccgacgatcatcatttttttcattacgggtagtatcctgaccagtaaagaattcatttctaaacttttctaggtcaaagtgacaattaggacactgcttgtcagttggctttacatcttctccacaatttggacacttcattttttattccctcataaacttttttagcttattatagcattctagcccttaaactaaaaaaacagaaagcatcgttatgctgctttctgtttttttcttgatgcgcggttaactaaccaccaagccataataaataaaatggcgatcccgattaacgcaccagctaattttttgatatcaccattgaagattgcatcccctccaaaggcatagataaatgaagtaggaaacattcccacaatcaccatcgacaaaaacttattaggcggcgtttctagtcgtgcagccgtataatcaactaacacgcttggtataactggtaccatgaaacctaaagtcattcccaaagtgggatgtttctgattcattaaccaattaagaaatctatttttcttaaacttgtgcgaaaaactaactctctttattagactttctacgatacagtttccaagaacatttccacaccaattaatggctaatccaatccacggaccataacaaagaccggctaaaatacaaaaaacagaattcgacattcccggaatcgcatttaagatggttattagtcctagtaaaaataagccatcccgtacttcgtgttgtcgaagcaaatagagtagttttgttttcatatccttccctgggtgcattaataaatcaatttcagggcgatagtcacgataaagcaagtataataaaattcctgctgttaaaatcccacagattataaataatatttttctcaatttttttgtcattatttcactcgtttattctaaattcatatgccataatcatattttttcacgtttcagaccaattatcaaaactattattatccattcgttcttatactttatcgtattataatagtaaaaataaagctatctcaaaaggaggaaaaaatgtccgcaaaacttatctttagtgatatagatggaactcttattacttctcaaggtgtcgtctcttctactactattgaggcaatacgtaaacaaattatagctggtaatttatttattccggtttctgcccgttttcctaaaggaattatgaatgtagtagataaaattaccaatttctgtccaatgattgcctataatggagcattagttttagatgaaatggggcgtccacttaattcacaattcttcgaagcttcacttgctcttaagttaattgaagaaattgaagcacttgatactaatgatcttgcctggaatgtctatagtggctataactggttttcttctcttaataaaaaaccattaattgccaaagaggaagaaacaataggagttaaatctttgccagtttctacagagcaaataaaagaattaaagggagttcataagatgctaattatcggcaaacctactcttatagataaaattatccctagccttgaatctaaattccctagcctagtttttgttaaatcagcacctcatcttttagaagtcgttcttaagggtgttaataaaggaaatgcagttaaaattattcttgatagttttgcaatggataaaggcaatgcttgggcctttggcgataattataatgatgaatcaatgtttgattcagttggtcatcccgttttaatgggaaatgctccaaaagacttgaaagagagcttatccattccaataactcttgataatgatcatgatggaattgctgcagtattaaataaaattcctaactaaaaaagattgaagttttaatcctcattcacaaaaggataaacttcaatcttttttgtctcggagaactaaatattatttagcctcttctttattcttttttctgcctaagccttcgtaagtaatcttcatggcagcagacatattaattggaagtaagaataccaaaagtaataatccaatatccacacataatgcaacttcaattaaagttggcacaccagatgggattaaggcggcgaaagtaccaccaaggataatagctgccgatattacaactgttccgataatatcgcaggcttcaagcattctttgacttgtactccagccagggtttacttctcccaactcacgataacgcatcattaggaagattgagtagtcaacacccaaagcaacaatcatgatgaagctgaagaatggagtgttccaagccaataatgatctacctaaaacagccttaacaatccattgattaattgataaagaagttaggtatgcaattactaaagtacctaggataaacattggttgtaatactgatctagtaacaaagatcaaggcaataccaatacctactaacataataattgcagttcttaagaagtcgctacttgcagtttcttgagtatcgtaaatcttttcagattgtccacccattgcaactgttgaaccagcaagacttgtacccttaactgatttcttaaccatgttgctaatttcatgagccttctttgctccttcagttgaagcagggttcatctttagaatgatgatgatcttagtagatttaagatctgaactcatgtagttatcaagagcaggtttaaagctagatgagtgaatcatgtttgctgggatgtagaaagtcttaccagctgctgaatcagctaagccagttaagtattcttgaccagcacctaaaccgctgtttactttgtcaattccggcggtaatcttaggattatttgatgcaatttgaccagcaccgtttgctaattggtttgcaccgccattaagttgaccaatacctgaacttaattgacctgcaccactgtttaattgaccaataccatttgccaattggttagtgccgtttaaaccagattgtaaaccagtgtttaattgaccagcaccgtttgctaattggccggcaccatttgcaagctgactagaaccagctacacctgcttgtaaaccacttgcaagttgacctgctccactgtttaagcgagctgcgccatcatttaagcgactagcaccggcagcaccttgagctacagcaccttgaacttgggttaagcctgagcttaattggttcaaagcagtagttgcgcctggtaaagcagtgtttgatgcagtagctaaagtgtttacttgttgtttcaagttatcaacttgacccattaaaccttgaagggtttgtaaagtatttcctacattatttgctgactctccaagtttcttatctgcttcaccagctgcttgaatattaccagctacactttgtaagcttgaagtaagattctgagttttttgagtagaagcagattctactttacctaaaatttgactaaaggctgcactcatagcctgcttttgttgatcatttaacttagcactatccatagcttgagcataagcttgtgttaactcagctttttcactatcgctaagaccagcacctgagctttgtaaaccttttaaagtgttacctgcttgagttaaattatcgcctatagttttggcttgagtaccaacatcagttagattagcttttagaccagcagtatctacagaacttgatgattgacccaatgcttgattcaattgttgaataccattattaatttgaggcaatcccttttgaagagcatctaattgtgccttagtagcactattcatttgtccagataattgtgcactcatagtattcaaaccatttactaaggcttgagtaccattttgcaaactctgagtaccactttgtaaacttgcagccccattagccaacttaatagttccgttttcaagttgtacagcaccttgttgtaagttcaaagtaccactctctaaacgaccagcaccagttgctaaacgcatagttcctgatctaagagcttctgcaccattttgaagacgtgtagttccgctagctaattgatttgcaccagcttgcagacggccagttccgttagaaagttgatttgcaccattctgtagttgaacagcaccattagtaatttgtttactaccgttacttaaagttcccaaaccatttctagcagtattaacacctgagttaacagtacctaattgattgtcaacgtaaagacgtttaattgattttccatttggttcagttacagaagatgcaaatttaacatctggatctgcttgaatctttttaacaatttgatcgatttcttttaagctcttttcattatcaagcttatttttgctctgaatgtataaagttgaatattcaggagtaccaattgagaaatgatcttgtaaaactaatagtccagcttttgatggtgtagaattagaaatttcatctgcatcatcataattcaaattatttgaatagaataaggcaaatggtaagactgcaactgccattaccactaagtaaataattggatgagtcaagctcccttttgaaagagcatgccataacttagagttgctttcaccttcaaacttcttaactggccagaataatttcttacctaagacagccataaagaatgggtttaaagttaaaagtactaccaataatacggcaaccccaacagcaaccccaacagctgaacgataaattgagaaattagctaaacctaaggcactaaatccaattaaaattgaagatccagaataaagaattgtcttaccagctttacgcaacgcatcatttgttgcctcatggttcgacatccccttactcaagttctctttaaatttatcatacagcaggatattgtaatcagtaccaataccgaacaaaacaataaccatgaaaacttgagtaaagtttgaaaatggaaagttaaatctctctactaagttagtaacaattgagaatgaagtaataaatgaaacaccaactgttaatagtgaaattattggcacaattggcgacttaaatacaattactaaaacaatgaaaataaagaagatagtaattaattcagtctttttaatacctttttgaaccgaagccgagaaatcatcttcaagaattctaaccccagttacatatgttctaactcctggagttttaacagcctttgttaaagtcttattaacgttagaaacagtcgaatgatcattagcaatatttaattgcacaatttctgttgttttatctttagaaattaattgtgcttttgttgcatagttgtcattaggagtcatcattgacttaataccaagctttttcttattgtcctttaaaaagcgaattgtatcgtcaattttctccttatcactcgaggttagtttcccgtgttttttattaaaaactacccctacaacataggtattatcttgtccatgcccccacttactttcgatgttcgttgcaatagaactttgaacatctttaggaagtgaaatttctgaatgctgacgtgtcaatgcatccacatttggcaacgagaagacagcaattagtaaaattgctatccatgctatcaaagcaccaagatgatttttcagcaatttcatgtgctactttcctttccccttatttcgtaccttcaacttggagttttggcgctacaagtcttaaaagcatctcatggtaattatcgtcagcttctttttctgtttcatcaatcacatatcgatctaagaaaacataacccaaaacagctccaagtaaactatgcaaagaaacaacattctttttgcctacatctagcttttctcctagatctactatctttaaaacttcttcacgaatttgttcattttgaacatattcatttagtccatagtaaatgccagaaatagccttatcatgtagtaaaaaatctcgtatttcatctgcaaatctaaacaaagcatccagacctgaatggcctattatcttctttgttaagtgctgacgcaaaacttgcagtctattaacacaaactaaaactaataaatcattacgattagcaacatagtgatacaaagattgagacctaattcccaatgctttagccaaagctggcattgttaattcgcttaatcccttttcactaataattgttatagcttgatcaattacttttgagcggtccaaagctctttttttagccaagataatcaccttctttttatgtactcatatactttaacacgtcaatctgtagaaaacaatctacaatgtgtagaaatttatctactttttgaaaaaataaaaaggagttataaaactcctttaaatctatttttgtttaatcatccaactattaatcgaatccccaattttagctagatcagcatcttcttcactaaccattgccatggtgtaagtttttccatcttcttgaattatagctgcaccttgtttcttatcagctattctataaaccacaccattaatgtttttcgctaagcctttttcagggaaattagctaactgtcctaaaatttgattatccacattggttcctaagattttcccctgataaagcttttgcatagtattaactagatcactactacttgtttttccagcaaaatctttaccaaaattatcggtgatttccgtattacttgcaccaaattcttttgcagtttgatttactttttcttttccaattttattcaaaataatattagcggcattattattttgttgacgcatcatcaaatccagtaaatatgtataggaataagccatatcagtctttaataccttatctccaccatttaagtcacttgatttaactttataaggagtcgccgagtttaaacttttatcttgaactgccttataataagccagcaacacaaataattttagaacattcccagcatttaaattatcttgactagtatttgttaaatcagcaaatatgttagaattattcaagtcttttacacttacttggtagcttcctagaacctttgaactagatttaacaatggttttagctaagcttttattactattttttgaaatagcagcctctccaatctcgctttctccactagtaatacgagcttgtttagtgccttctttcattttacttttttgagctactttggctgttgaatttccataaatttctaaagtttgtgttttcatatgattaatactagtcatataaaaagctaatgcacaaaaagaggataaaatcgcccctaaaaatattttatttttcattaaaaatctccttaatcacatattttttattttatcatgctaatacctaaaaaagctttaaatactaaggattattctattttttaagattatcttttctttatacaggatttgctgaatgcgttcacaaattgctctttttttagtacaataattccagtattaatatttacagtgagggattattatttatgttaaaatatatgatcggtattgacgcaggtggtacacactctacggcaatcgcttatgatgaaaatggtaaagaattagatcgtgctgaatctggcccaggtcaaatcaacaatgactacgaactcggtatcaaaaacattgctcaagcagttaatgaattgcgtgacaagattgatggcgattgtattaaggttttagccggaattgctggtttatctgttgttggtaatgcaccagaagtcgcagcaactatttcttcaatggttggtaacattccaactcgtgctattactgactcacttcttgctctttacaatggtcttgaaggagcagatggtgctttagttattgcaggtactggatccgttgttaacggccgtcaaaatggctctttaatcgctgttggtggttacggttctttacttggagacgaaggtagtggttatgctattactaaggctgctcttcaatctgctcttcttagctgggacaagcgtgaaaagaattctttaattgatttattcgttaaagaattcaatgttgataatatgggtgaagttcctgctaagttctataacttaactagtccagaagttgcttcaaaggctgttaaagttgctaagttagcagataacggtgacgaagatgctcgtaagatcattgcagatcaagcacatcttttggctcgtgacattatcatgtgcttagaccgttatgaagatcctaagccaatgcgcattgctttaactggttcagttctttcaaacaacgctatgatgcgttcatacatggaagcagaagttaaagaaaaatacccagacgcagtatttagcgtttcaaacggtgaaaacgcacgtggtgtaatttttgataagagtaaagattaccgctacttcactaaccataacgatgatgaataaataagttaaacactataaaagcacctcgatctccgaggtgcttttttatctatagatctttatacattaatacgtgttctataccgccctcatcaaatatatcacctttaacttgataaccaagatgatcatagaaaggcttggccgtcatttgcgcatggcagtataacctattaacatctttttcttttaggtactcatgaacttcttttatcattttacttccaagatgcattccccgtgcatcttttgagaccacaactcgacctaaataccaatctccatttccatctttaaaaattcgacaagtagctaaagcatcatcttttccgtcatttaaactaaaaacatgaattgcatgaaaatcttcatcatctatttcaggtaaggtaattttttgttcactaacaaaaacttcatttcttagccgttcgacgcaaaaagcctcatatccagtcatttcatcaattgtcttaaaacaaaatttcattacttcaaccccttaactaaaatcaaatccgtctgtggatcttctccaactacaaaagtgtgttgactaactctcttaaaaccatctttttcatagaaagtctgagcctgataatttttctcccaaactccaagccacatattgtccttatctttttctttagctattttctcagctaatttgattagcactaatcctaaaccttgatgttgaaaatcttgcttcaaatatattctttcgacttctaaagcattaggaaccacctgctctgtttgcgcatctccctcattcacctttaaatagccagccactttattatctacagttaaaaagtaaaaactactattcgcattttcaacttcatcttttaatttttcttctgcatatgctgtatccaaaaattctctcatatcttcggcactattttgtgatccaaacgtttctaaaaatgtttgtcttgaaatttgttgtaattctctaatattatctgctagtacttctttaatctcatattttactgtcatattaatacttcctctttccaccattctttacaaaattccaactttcacgtgcatttttctcgagaacacttagatatttttgtaatcgagcctgttcagctttagttaagccttttgttactaacgtatttgaatagacgttttctctttctatttctttagctaattttttacctgtgtcggttacaaataaatgtttgattttcttattagtttcatcatcttctttaaaaataagtccctctcgttcaagttttctaattccacgggcagtcgttgtacgatcaatatttaataatgtagctaggtgatcagaaataatcccggggtgttcaaaaactcgagttaaatataagtattgaccacgatttaattccaaatctttaaactcaatgttagcaatcgaatctaaggctcgtgaaattgaaccaatttctcttaaaatatcttcttctgccatctttatgtctatccctcctattcgtttgttctagtatatgttattattgttgcaaatgcgacaataatagaaatgattattactctatttgatttctatgttaacaataagtaaaatctatctgaatagttaaataagggagattataaaatgattttaagaaatatcggaattcttctaacaattattgttggaattgagcatattggaattatgtggttagaaatttttgggaaaccagacttacaagccaagtcgtttgacatggatgtagattttgttaaacagcctgccgcaaaaacagctttagctaatcaaggtatctataatggaatgctaggtcttttaatcttaattgtatttttcttcttcagaatgccaactttaatcactgtatggcaacttttgcttgcctttgttgtagttgtcgctatttttgggggctttacagcaagtaaaaagatttttgttgttcaaatgctacctgcattaattgccttcattctacttttcttctaaaacatctataaaaaaatgaggattgtcataatgacagtcctcattttttacttaatattctgtttttattgattccaagcactttcgaacttagtcttaccggcatcaatttgtgaattccagttttgacccttctttgcttgtgcaaagatgttttgcataattgaattcaattgagtgtatgcagtgttgctgttcttaactacaggaacactgtataagttcttcattgccttgtctaattgagcaggaactttagacttagttgagttcttgtaagcactagagttaatcacattgttagttacagggatgtatccagtttgatcagcccaagtcaattgttggttcttacctaacaagtacttaatgtacatgaaggcagctgccttttgttctgcagtacccttgttgaacatgtagatatcagtaccttgttgcatgttgtacttagaaggacgaggtgcaacaccgtattggaacttattaccaacacccatcttaacaaatccttcaccagcactagtacctacaaacattgcaaccttttggttagagaagtcaccagaaaggtaaccagctgaaccagcagtcttgaagtaaccagctttaataccatcagcatagtagttgattactttcttagacttagaaccagtaaagttgatgttcttagagaagtttacgccttcatccttcatacctaaaacgtagtagtttgaaagtgagtcgaatccagcaccaacaaccttgtggttactcttttcgtaaatcttcttagatgctgcctttaattcagccattgtctttggtactttaacaccatatttatctaataaatctttgttataagttaacatttcaacagatttattaaatggaataccatattgagtacccttaatttgtgcaccctttaataattcttcacggatgtcactcttcttagctgagccccaaccaatcttactattgttaatgtaaggggtcatatcaaccaagcgtttgctattagcggcatttaaaagccagccaggataagcttgagtaattgtaggcaagttatttggtgattgcaaagttgagttaatctttgcttgtaaatcagtatacttaccttggttttcaagcttaacagtaatgttaggattcttcttttcaaaatccttagtcaagctttgtaaagtcttttcttgagttccagtcataccatgccagaaaactacagtagttttcttggtaatcttagttggaatatcagctgacttactacttgagctatcattactcttagaatttgagcaagcagtagtgcctacaagggctaaagcagcaactgcaactgctgcaaattttttagtgaacttcatatgttcctcccaataaaaacaaacaacaaaataaaattttaattttaactaagcgtaaatacctctccgcgcttaggtaaaatcctttctccaaatgggttttcttctaattctggatgcaatgtgtgcacaggagccaaaatttttggctcaaaacccgcaataatttcttttaattcagctacatccgcatgtcctgaacaacgtagagttatcaattcaattccacgtttttcaatattttcaataaacggagcataagctggatcaaagtctcccagaggctcagcattactatgaatgtataagcctcccttttgtagttgatcataatgacccactacttgccagaaatattgatgatcgtcctttagaagatcttgataactaacttcaagatttggatcgagcgcatcaatcttttcatcttctggcaagtagtagtaaggaacatcctgctgtaatgccaattttaataattcagcacgtttagcatgaaggactacttttcgaggagaatctgaaataattctcaaaattcgctctacatttgtaggataagtattaaaagtcaactggcgttttggattatctttttggtatttaactactctttcagtaagttcaacctcattcttaacgcctttgaactcttcactatcctcttcactacgttctggccatgaaacaccagtaccttcgataattagcatatcacattccttaccggccgccataaattgacgcacccaatcgggatgataaccatgcaagcgaatatccccagtatgaacgattgtcttatcaggcgttttgatgattaacccagttgctccgtaagcatcatgatcactaggaacaacggttaaagttatatctccaactttaatgggctggtttaatttagcagcaattataggacgagtataattctttggtttatcagctgctggtaataaaaactccccatcccgattcaacactggtagcaacgccgcagttaatggaccagcatatagtggaatatcgggcgctaaaagattcatagctttactatgatccaaatgaagatgagaaatattaagctgcgctgtgttgccaacgttcgtgatctatttcttttcccgtaatctttggatcatagaaatttggtacatcaccaatcaattgatatttaagaagagttgaaaaatcttcatcttccattttcagtcccagttctggacggtacacttctcctaaatcaaataatacatgtgacttatcataagctacttcaatcattgggccgccaatagtcgttaacccattataaaaagtaactgtagttttaggctttgaggtcattacgtactactcctcgaataatttgctttctaaaaatgaagtaaacaattaaaacaggtactactgttaaagttgctgctgctagttgaagttgcgtttgagcacctgcatcagaagcaaaggcagctaaaccattgttcaataagcgcatcttatcttcatttgttaccaataatggccataagaaggagttccatcctgaaataaaactaagcaaggcaacagtaattaatccacctttagacattggaactagaattttccaaatatactcccagtcagaagctccatcaatcatagctgctttataaattgttggtgaaattgctgtgaagtagctttgtaaatagtacatataaaagatagatgttaagaacggtaaaaccaatcctaaatatgtattcaataagcctaaatgagcaattgtattgtagttggtaaaaattattgcttctcccggaaccattaagagtgagagaaaaattagctgaataaatccttttcccttaaacttcaagttggtcattgcaaatgcaccgagaattgaagtaaacaatgtaacaattgttgtagttgccgctgtaataaatgtgtttaagaagtatcttgcaaatggtgcttgctcaaatactttttgatagttactccacctcaaagtctttggaattaaagttggtggaatagtggtggtttcttgataggacatcaatccacctaagatcatataaataaatgggaaaacagttataatgccaaaaattccaatgaatagatagacaaaaatcattccccaacgtagttttttcttcttcattctaactgttcacctttttcatcaattttctttgtaagaaagttacgaacaatataaataggaacaagactactgttgcagccattgctacaccaggcgtaccaacaatttggaatttattataaatatagtaaactgccgtcattgccgaattacccacaccagcttgtccattaaataatgcataaacttgggtatagatcttaaatgccccaattaagtttacagttaaaagaaaggctaaagttgggactaactgtggcactgttatgcgccagaacttttccctacttgttgcaccatacatatcagctaaaacatagtaatttggttcaatatttcttaacgcacccatcaagataacgatgttaaatgccaaagatgaccaaacaccaaagataatcaatgaaacaagacttagactcggattatctaaccaatcaggttgtggtaaatgaacaagttttaacaagaagttcaataaaccgtattcaccattaaaaatatagcgaaatacaattccgattgcgatcgtacttgtaacatatggcataaaaaacatagtttcaaagaaggcggtatgtttaatctttgaaaagataaaccatgctaacgcaacagaaattattaaggcaattggtacagctaaaaatgaataaatggctgtattcataattgcacgccaaaattctggatcgctaaaaatatattgatagttagaaaggccattaaattgtaggtcaattaatggtccaccctgaaaactcatcgtaaaagcacgtagaattggccaaatactaaatacagtaacgcaaataatggccggtgctaaaaataaccaagcttttttctgattatctttcattaatagattcgctccccatctggcttaaataagtaaacgcggtctaagttcatcttaaatttcacgctatctccaggttttatttcttgttctaaatcaatcaatgcacgctgatttgttccagcatgagtaaatttcaatactcgttcgcgtccaatcaattcgacatcatcaatcacttcggaaagttcgccttcatcacttaactttaggttttcaggacgaatactcaatgtatagtctccggctactaagtcgcctctaaattttgcactatctaattttccaactggaatctcaaagtctgtaccaataatcttattgtctgctacctttacatcaaaattatcaattactggattaccaataaagttagcaacaaattgattattaggttcaagataaaggtcttgacccttatcgtcttgttgaattactccattatggaaaagaataatcttatcaccaattgagagtgcttcttcttgatcgtgggtaacgaataaagtagtaattcctacttccttaaccaaattacgaatttcttcacgaatctttaaacgtaagcgggcatctaagttacttaatggttcatccattaacaaaatttgtggttcttgcactaatgcacgtgcaatcgaaacacgctgttgttgtccaccagaaagattgcccggtttttgatccgctaattcttcaatatgagttaatttcataaatttttgggcaattttttcagcttcatcttttggcttcttgttctttcccaccgtcattggaaacattacattctgtaaaacagtcatatgtgggtataaggcatagttttggaatacatagccaatattacgatcttttggcgcaacattaagaagagacttaccatttacaataatgtctccaccagtcggattcaatagtccggcaatcatatttaaagttgtagtttttccacaaccactaggacccaacaagcacactaagtcgcccttctttacagaaaagctgacagacttaattgcttggtaaccattctcataagttttttctaggttatttacctgaatgaatttatcttcgttcatatatctctcactactacatttagatttaaatcatattacatcacaaattttatgataaaagcaacaaaatcacaaatattttttcaataaataattcgtactttgtgaattttttctgcttttttgtggataagatgtggataataatattatttcaggaacaatacttatataaaaataaaaataaatcgtattttacctcttgcattttttagatatccccttggaatctgttttaccaacatacaagatagagaaagtcgaacaataaaaaaacactacatcttgtgcagtgtttttcaaaaaattacaaattgtcgccacgttcaaattgaaatttagaagaatttagtgcttgtctcgtcaaatcacttatcaatttcttggttttattagtgatataagcagccgtttcagcattagcagccgttaaatacttagtttgttcttttccagacaattctcctgctttctcatcggttgctgagatacggctaacagcataactttgacattcatctctaaaattctcaacttggtaaataaactgatgatatcttggctctactaaaacttgcaaactcttatacaaccaatatgcactagactctggagtaaccatatgactagctgtttgataatttaatggtgtgtcatcaatattggtatagaaaggtacataaggactataagcataaaaaccaaagttaacccattgaatacctgccatttttttaggaacatcatttctaatttgaagaatacaactagattgatttctatccaaagcaattgatctaaacattttttgcttcttatcatcccctgaagcaaaagatcccattgggtcgtattcagtaccgttatagtgactagataagaaaaattctacatcttcaacgccaattttcttttctggctttctaataaatggcatttcttgacttaacggatcttgctcaatacttggattaaaaagcttttgtccataccaagttcttggggtgttatagtaactatctgcttctgctttagtaccaaaaatatctctaaagctccacttaccgtcagtacttggatttaagtgattcttttttacaaaatcacgaatagttgatgcatacataaaattatcatgatcatcaaaatcaatatcttgaatcaccatgatattaggacaaattgcataggaatcttcaggaattctttgagctacccattgatgaccagcgccagtttcaaaataccaaacttcatcgtggtcagaaaaagcgataccattactttcgccagtaccatatttttcaattaatttacctaaccgttctactccttcacgagcagttttaacaaatggtaagaccaggtaaaccatcgaatcttcatctattccattctctaccaatggatcatgacctaagcagcgtgcatttgtggcctctgtttcagtagctgacatagcaacgttatattcattaattccctgttcatcccagcggccttctgattcatcagctgttggagttgcagtccacttgcaaccgtgtccctttagatgaagctttaaaccattatattttgaaacgtattcttcatcatagtctcttgcttcatggacaacaaaaagcttttcattaataccaccataaccgtcttcatcacgggcaataatagttgagccatcaattgtagctttttttccgacaatcattgccgtacagttatccttgcttttgttcattattttctcccatataaatataaaaattaactattgattaactaccatattacgatctattttagccctaccattattataatcaaatacataatcaggctgcacgttatagatataaacattaaaatctaaattattatttaaacttatagcctgtaaattaataccacgtgccattaattcatttcccctaaagattggcgttgcctgaaaaataaccttattaccttgttttaaggcattacgtacttttccttcaaaaatagtctgaattttctggttagaaaaagctgtttgtgtaaataggtttttaggattattttgatcacctgattgattattaggattataatttccatcttgatcaattcctgcagaaactgaataagcaattaagtgtccacgattataaatttgagtcccattttcacgattagaatgccatgcagttggattaataaactgtcttacacgtaaagaatcatttgctacatttcttggctctaagaaggcagtatttgaatgagaagttcgattcaaattatctaaattagaatagattaccttattaaccttccaggcatttttaatcaaagtagacttattattatttacatagacataggccttgtccccactcttaaagtctaaattagctaatttttgatagtcagcacttgataatccaccataattagtatccgctgttgtcgcattctttactacttgctgggaattatcttggttctgattttgattcgctacttgattagaagaattaagcttaaaccaaccaccccaaataataattactagcgctataatccaatttgctactgtatttttctgtttttttcgatatcttcttctctttgccatttattctttcccctaacattatttctttcagtatagatatttgaacgtacgtttgcaatgtaattaataagtttttgtttattcagactgttacaataaacgtaataagtatactgaaaatagaaagaagattaagaatggaatactttaatttaaatgatggaaatcgaattcctaagattggtttcggaacctataaattaaatggttctcgtggagtttttgctattcaagccgcactaaagaacggttatcgtttacttgattctgctgttaattatgaaaatgaaggagcagtaggtcgtgctattaaaaatagcggtataaatcgcgatgatatctttataacatctaaattaccagggcgtcatcacaaatatcaggaagccatagaacaaattcaagaatcgctttatgcagctaatcttgattattatgatctctatcttattcattggccaaatccaaaggagaatcattatcttgaagcctggcaagccatgctagatgctcaaagatttggcttaattcgctcagtaggtgtttctaactttgagccatcacatattgaacatttgtaccgtgaaacaggcgttatgccggctattaaccaagttgagcttcatccgtactggtccagcaagacaattcgtgagtatgataataaacataacatcattaccgaagcatggagtccgctgcaacgtgctggtgaagcttttcaagaaaaagaaattattgacttagctcaaaaataccataagtcacccgctcaaataattttacggtgggaaactcaacttaatgttgttcctattcccaaagccagttcctatgaacatcaaattagcaatttagatatttttgatttcaaattaactcctgaagaagttcaaaagcttatcaatttagataaaatttctgcaagaagatttgatcctaatgaacatgaggaattttagaaagtaggtaggctggatgcaaaatatattaaataagcgagtctcaaaaattgccttgttttatgaccttgtttttgtctacatgatatctaaaacaacagagattcttcatcatctagagcatggattagtttcacccacctcttttgctctttttgcattgattgtaattatttttattaattcatggatgattcagactgtctttactaatagatatgggatcggaagttgggctgacattgccttttactttattgatatgatgatcttactttacatgtctaattctttcgatactaataatctaacagagatgaaagttctatttatttctgctggattactttctcttactctagccagccactatttaatcaattactttcaagttaaaaattctgtcgatcgaaatatttcccgggcattttttatgattttaatttttagagctcttaccttaattatcggaggaattttagataatatttttggctttattttagctgttatcggcatcatactaagctggttaatgccacttctcactacaaaatatacgcttaagcatccaattatttttcctcatttacttgaacgactgaatctcttagtaattattatctttggtgaaacaattattggtattgccgattactttcaacctaaaactttttccttctactctatccttatttttctaactgttgccttgctctttttcacgtatgcactacaattcgataaattaattaatgaagaccaagaggatgtaacaggtaatatattaatctatcttcactatttaataatctttggaattagtttaattactgtaagtataaaatttatccatgaatcggatgctaactcatggtttgctgttttatgtttatattgtggaattggtttattctatttaggactattattttcaactcattacaataaactgcaatttaagttaaaaaaatcaactatttttctttttattagtacaactttaattggaactatttcttgtctcatctggtcaagctttgaggttattaccattctcacttttattattgtttcaattaatattagttggctcgtacatgcaaatcttccccatatcaaaaaaggaatcctgctttaggattccctttttaatgtaaaaatattttaactacgtgcccaattatcaagaacattcaagaaaaattgctccgaccagattctaatattttgaccttgcttttttaatgctcttgccttatttaattcaacgatatccgttctgaagaaatcatgatctccaactaaaagatagtctgtatcttgaccaacttcatcccgaataaagccacccaaattctttacagcattagctagttcatattcatctacatctaagtcaccagcaattacaacatttttatgagcaaacggactacggaaagcttggctttgcttaacaagctcaggccattcactagttaaatctagtgttttgaccatttcttgtgctctaagcatatgttcttgcttaaacaacttatgaaattcatcgaaaaccttttttgtatctaggcagtcatctaaaccgcgatgctcttgagtttctgcgatatctaatcgatgcatacaatctaaaagccgattgtgttgttcttgtggataaaaactacgagctaaacgataaacatcaacatagtcattatttaagacagttaagtgatatttttcagctaggtcatagacaaaattcaaatcaaaattaacattatatccaacaattggatcactaccaataaattcacgatacttctttattgcctcttgaacaggtaatcccttttcttcaatcgtcgtttcatcaattccatttaatttggtaataaaagcaggcaccttattactatcaggaaacttcactaattctgaaaaagttgcaactacttctccatggcgaacctttaaaccacccatctctgtaatccgatcacgatatgggctaaggccagtagtttctacatcaattaaggtatagttatcgggaaagctcggcttttcgatgcctttttgacgtattttttcttgagctgctggaattcgtaaaacaccttgaataactgaaatactcattttttacctttcattactttgaaatcttttcaattgcttcaggaagtgccatgtctagacctacacttcttttttgaatagcgtcaggtaattcatcttgacttaagtctgctgctacataatgccaatctttgaactgttcaaccaattttaccattggatcaagaagctgaggactagttggatcaactcctagttcaagcactacaaccttcttagtctgatttctggctaaaaaccaacggaatctagtatttgcatcctcatctggaaagaagtgagcatttaacggcatatgaagttccattggtgaattacaatcctcacattttggaacctctccttggccattaatatatctcttcactgttgacaaatcagagtgtgtaccgtgatttaaaccactagagcactgcatcattgtccagtcaccaaaaatattaaagattttttcttgatcaaaaccatctttttcaaaaaaatggccaaaagtactagtagcaataaaataattctttccatttaaaagttcttttaattgcttcattgctttacttggctcatattcaactgaatactcattaattaattgactccagaattgccacttttcatcccaagaatcaaaatctttatctagtgcatccgcaattgtttttacatgatatttttcacttatattcttatattcaatcgggaaggtcaaattgtcaaacatatcaaggccttccatctgtgcaaacccattacctgcagtcacaataattgcatcggcatctgctaaccatttttttatctcttcaaaatctttcatgatcatttcttccttttatttttcagaatatcccaccagacgtaactgcccattaatatactctcctaaaaagacatcatcagtactattataaccagctttagttacttcctgttcaagccaagcattagatttatggatcaactccaaaacgtcttcatttacctgtccatcactaataatcggaaaacgaatattatcttcatcattttcaattatcgttaattgaccattttgctcaaaaatacaatttttcactttttcaactgaataaatcccgctacttctaagcctaaacattaattcattggcagaaataccagctttcatacaatttccgaccaacacatgaccatttttaattacttgaaccggttttccatcaatcaaattacgaatccaattactgcgctcgcgcccaaatttcaaaataaaaactactaaagtccaaacgattaacaccaataaaaattgaagaacggtaatactttgattatatattaaaccaccgataataccgcccagtacataattttgcagctgatccaaagctgttgttggagctaaattactttttccaaaaacattaatttgaatgatcaaggttaatatccctagagaaaacttaataaataattgtgtataatccatcttttacctacttttgcacatatacatgatgatcaatcacgtgcgctcgatttaatgtatagctattattgttttcgtttaaattcaattgatagtcttcatttttcgaatcaattcgcacaatcatcccatcctgcaaactcagtgaactgaccatcacatcgctttctttaacattttcatcatcagcaactgatttaataaagggaacaatttgggcagctttagacttctgttcattattttgcacatatttttcatattgcgtgccggtaaataataataaaaacaagagggcaatgattcctaaatccctatatctggtattaaaacgatcacgcaaatatagaattgcaaaaataatcatcgcactagcagcaataattattaaaatatataaagctgttcgatctgtattttgatggttttgaatataatttatcgtatagaaattcatttaaatctaatacttcctctttaatggactttcatcacgtttatcatttaataaaacatgctgcttcgcaatttcaatcaaggttttagctaaaagagccatgctttcagttgttacatattcatatggtccatggaaatttgccccaccattaaataagttaggtgtaggaatacccttttctgaaataaaatcgccatctgttcctcctcgaaatgggataacttttggctctaatccaagagacttataggcatgtaaaactagatttactacatagggatgctctttaatcaaatctcctggactatgatattgatcatgcatttcaaaagttactcgatttgtcccatactttttattcaacttatccactgtacctgtgattaactttttcttttgctcaaaaccatcagtatcaaaatctcgaatgattaattgaatttttgcataatcgacattgccgttattggataaaaccataaaatagccatcaaaatctttactattttcagggacctcacttcctggtaaagcttgaataaattcactagctatcaaggctgcattgaccataagaccgtatgcctcgccaggatgaactactgtcccatgaaaatcaatcgtagccgctgctgcattgaaggtctcaaatgcaatatctcctggatcaccattatctaatgtataagcaaattcaacaggaaaacgttccacgttaaaacgagcagcacccttaccaatttcttcatctgggccaaaagcaacccaaatatctccatgttcaagataaggattttcttttaaaagtttgagcattcctagtaatccagcaattcccgccttatcatctgcaccaagtaaagtcgttccatcagcggtaatcaatgtttcacctaaatgtttttttaaactaggaaattcacttgtggataagacacgtccctcttttaagaaaatatcctttccatcatagttctgatgcactagcggttttacattttctgcattaaaatcagccgtatctacatgtgctacaaaaccaattggagtcacttctttcttagttgtcttttttagttttcctactaaataggaatcttcttctgaaaatgaaatattttctaagcctaatttttctaattctttctcaataattttcaacaagtcaacttgaccggcagtcgtcggcaccgctgtactttgttcatctgaacgagtatttactttacagtattctataaatttattttgaatatatttttgatcaatttcaggcatttttaccatccccaaactatttttaattatattttaagaaaaaatagttttctgtcaattcactatagttccgaagctccactttctgcatcaattttctgatttttccgataaatatctcctttaggattattggcatcatcaaccaatttttgtccggtttcttttaagtagtattccacaagtggataaatatctcgaacagtttcattaattccagcaaaatgatggtctttatcaaaaatagcccgatatgtgtctaccataaatcttttttgagtattagtttgatctgcaaaatgcaattcttttgcttcacctgtgcttaacttgtggaatacttctgttaattgcttcttttcactctctgtttggccaagagacgtaatattttctccaagttctggcggattataattcatccctggtaattgtttataatatgtaaattctccagtcttattaaaactaagcaaactactaggaaacgaagaaagataattatcgaggtcttttactttcattagtcccgcatttaactttacatagtcattaccttgtgcagcttttttataatttttagtccaattttcattcatttttgatacctcacaaataaaaaaagcatgtcgaactcgacatgctaattttaacgtatttaattacatttagtctttaatagcttttaacccttcacgctttcttcccatgttaaaccatggtgaaacagtaaaggctaaaacgtcattaacaacgtaaattaaggagttaacagccattgctaaagttgcatctccctgtgcataagtcacaccccaaagaattaattggaaaattccactagcagtccaccagaaatattggttattgtagcgtaaaaaacacataatgccagcagttaatgaaattgcaaagctaatagcatcgatccaaggacgtggatcgttagtaaacttaccaattaaatagccagatactgcataaacaactaatgtaccaacaatggcaacaatccattctttagcaccaaacttacgtaagtgattcttagtatcgtcattccaagatctaactgaaataataactggtaaatctaaagttaaaatataagcaatttgttcaaaaattgaaagataattcttagcagctagtcctgcataaataaaacaagctgcggaaatcaagcctaaccatccattaattgctttagttgcattaatagctaaaacacataaagtaccaagcaatgtaccaataaaagtaattactgttaaagtagtaatcttattttgaatcaaaatagctaattggaagccaaaagcaaagaaccaaagcatataattttgaactggccaaccgtgtaattgcttaaagagccaaacgaagtagttatcctttctttctttacgatcttcctgtaatgatgtggaattgtccatgtattaactcctctttctttatattaggtcacacaatatattgtgccttatccgcatttttctcaaaaaagcatctgtatctagtatagtagttaataaattgaaaacaagagtttacaattttcgttaaatatgcgggtaagtgtcatttaaattttagatagcgctttctttatcttagtaatcatcttcacttaaatttttatatatttttctactcttacaattcaataaaccacgtattttttatctttatgtttacttttttaagtcgtttttttacctttagcttgtcttttcccccgactagcaccagactattttccttatctaataatccattatttaaatatggagtataatattcttttagaaagctaaaatgttattttattaaaaaacatccataaccgaggaaagaataaaatggaacataaaaatgatttacgcaaattgcaataataaattgaacacttttagttaagctgcttgatagattagatctaattctctttcaaagatttcatctggtgtatgataggccagtatctttcttggcaaagaattgcaccaggtttcaatattaatgatgtcttgtaaagaatagttagctattgcttctcccttaggaatgaatctgcgaataagaccattgtgtctttcaactgttcccttatcacaagaagtgtaaggatgggcatagtaaaccagtgtattggatactttttctaggttggaaagatctgcaaactctgagccattatcagtggtaatggttttaaaaatatcattccaatgttcgctgtattgcctttggagttctttaaaggcctgcatgacactgacagaagtcttgtcaggaatacgaagaattaaaaactcacgactcatacgctcagataaggttagcagtacctcatcatctttgctcttatgtccgagaactaaatcgcattcccaatgaccgaattcattacgtttattgatctctttaggacgttcttcaatgcttctgccaagttttttcttatttttgcgaatacgatgaagcttagtattgcgtttaagcttctctggcaagtcgtaattataaattcctaataagccttgatcaacgtaattataaagagttttggtgcagacaacatcgctgctagcgaattcgccaacagcagtagcacgattactgcacacatcaagcgaccagccatctttaaaaaaatgcttgtggacatagcgcatgaattgagctttcctgagaaagtctgatttgcgcccacaatttttacgatgagctttatatgcatcatgcccttgagtagccttatattttttgactttaccatgatacagttttacagtgccacgcttaacctcatagctgatagtagaaggagaacagttaagttcacgggcaattgcacgcaaagaatagccatctttcaaacgcaattgaataataactcgctcttcaaatgataaatgcttgcctttaacgtgctggttcatggtagaatgtaaagagtccattttgacctccaatagaaagtttttgtggttattaacattctatcaaacaggtccgaatggactttttattttttatcaagtgttcaatttaattttacaatcagcgtaaaaatgatttattttttattactaaacttaatgggaaggaaacgtttagttttagaaaactttcagttggattagttactgttgctttaggtacaactttctttttagcaagttctaatactgttcaagcagcagatcaaaataatactgatagtaaccagaatattagcaaggaactaacttcaaataattcagtcgaaacgactcagaaacaagaaactagtgctgaaaacaattcacatagtagcgatccaagtacaaaagataataattcttcaacacaatcatctctcacttctaaaaatgaagtgactgtcccaactaatcaaactaacaatcttaatgaagaaacaaatcagaatgaatccacagtaagcattactggagctaaaactaatgattctcttatcgctggcgtaactcaaggtgccattaatgtgcatatcaataatcatgcgactacaccactcactattaatcatggtgaacaagttaacgtttcaattaacgataaaaataatctgttgagctttaatgtaaatccaactaaaactagtgaatttgatatgaatagaactgatacagctgctaataaagaattcacttttacttacacaggaagtgatgacggcatcttatccggttttgatgcaacttttccatttaatgccgatactactgctactacccaatactatgaaaaatatggtacttaccccgatttaactcttcctgttacagttactttgcctaataaacaatcatttacccaaaatcttccaattaaaattaatccttatgaagataaagttatcaatgaagagattctccatggttttataattggtccaaaagttatctggacgcccggagaagacggcaatccaggcgcaaacggagtttatacagaatatggtgctaactatactggtccagaacctagtgcaaaagctgacattccggttgcccaacaaaaagatgctcgtctaatgcaatatgccattgattggaactacgggtcatctaccaatccaagtttaaaaccactgcttaatgttcttgctcatattaaatttagtagcggtcaaagaattcttccatcgactattaaggtattcaaaattccttccaatataaaagtagttgcttctgatggacaaagaatcagtattaatgattattattcaaaaatctctacgctttcagaagatactaactttgaaaactttttaagaaattctatttctaatgatggcagagaaatagttattgaccaaaagggtaactttactgttaatggtgaagattattctaaaaatgggccttactttattcagctagatactcaacttgatataaataagattcctgattggattaacactcctagctccggtccatctattagtactccgactacaaatgaaaacgactggaacccatctggttctggtagtactgctaatacttttacgcaaacctatactaactttaaactagatccgacagtagacagaattattaaaattcgttttattgatgaaaacactaatcaagaaattccaaacagcgctaaaaatataattactgcaactaatagttcagttcctaatcctacaatggacattattaaagatcttgaagaaagacattatgttttagatcaagaagcaactgaaggaaaaaatggtagccatagtgaaaatttaactaactataacattgctactcaaaactttaagcttgatagtttgaacaatagctacaacagtgaagaaatcaacgttaaaaatacttcaccaaagtattacgtttatctttatcatgaaacaaaacctcaatctcaaactagttcagtaactgaaactattaattatgtttgtgctaatggaacgaaaaagggcgaactagctgctttaccatatactcatacagttacttatactcgtaatggtatcgaagatcttgttactaattacatagactggaatagttggatgcctgattctacctttaacgcagttaattcaccaattgcttctgattccgcctatagtctaattgatcctctagtagttccagcaattgagaccaatattagtgaaaatggagaaattactactcaaaatagcattccactatcttatactgttaactactacgctcccgaaaaggccactctccacttctacgatgacactgacaaacaagacttaacagcatacttacttcaaaacaatcaaacagctgtaataaatgatatttatgataaagcagataataattcaactaaacaagcaatttcatttgcaggtgtagataaagttattgactttttaaatagtaagcactatgtattcagtggagttagtggaatcggatcaactagtagtagtgactattcaaaaatttcctatggaaattttgatgacgatgaaacccaagatcaaaactttgtgcttcatttcaaacatgagactgagccgatttcagatactaaagaagtaacagaaacaattcattatctgtatgaagataattcacaagctgctaatgacgtaaaacattcagttacctttacaaaaactggtactaaagatttggtaactggtaaggaaaacagtaaatggtctgccgtccaaacatttcctgaagtagtatcaccagtaatttctggctatactccaactcaaagtaaaattgctccaattagcgttgatcatacgtctaatgatatagataaaactgtcatttatactgctaataaacaacaagctacacttagattttatgatgatagtagtaagaaatttattgattttgctaaagatttaattgtgactggatcaagcagcagccctattttattcactattccgaaaagttatgacttttcaaattataacttcgttgctgtcaacaaaggtgataaccctactcaaactactgatagtttatcggggactacattaaatgatgtaacttatggcaagtttgatacagataatacaacgaatcaatattttattgctcactttactcataagatcagtccagttaatgaaaataaatctatttcggaaaaagcaattctatatgcagaaaatggcccacgaaaagataatatttttaagaccttgaatttaggaaatattaactttattagaactggtcaaaaagacttagttaatcagcaaattacgtgggatgcttggaatgttgaaaataaagcacaaaatatttccatttctgaaataattttcaatgtttataagctcaattcacaaaatatttcacagccttcttcaacacttaaaaagtttgaacttaatggtcatgaaatttcacctatcgaattcgataaaaaacaagatcaagctttaattattactcttccaaataactttgaattcttaataaaggtaccttatgttcttaccgaaaatataactgtaatttataaggatgatacaactaatgaaattttagagcgccaagtgttatccggccaacctgatactagttctcaatattctactaagaatacaataactaagtatctggctaagaactatttactagtatccgatccaactaaccaacaaacactttcattcgataacacagaagatccagacgatcaaacttacgtggttcattttaaacatcaatttgaagaaataaataattcgaaaagtattaaggaaacaattaactatatttatgataatggtacagaagcagcccctagctacactaattcgattcaatttgttcaatctggagaagtagatttagtaactaacattagaaaaataaaagattggacaccaagtataagtagtttttctgctgttaaatcacctattattaatggttatactaccgatcacaaacaaattgaccaacaatttattactccaaatagtaaggatttagtatttaacgtagtctatactgctgagccggtgaaacctactaagccggtgcagcctatcaagccgatgcaacctactaagcctgttcagcctaccaagcctgtgcaacctaccaaaccggtcgagcctaccaagcctgtgcaacctactaaacccgttcaacctaccaagccggtcgagcctaccaagcctgttcaacctactaagccggtcgagcctaccaaacccgttcaacctaccaaaccggttcaacctactaaaccaattgaacctactaagccggtgaaacctaccaaaccggtcgagcctactaaaccggttaaacctactaagccggtgaaacctaccaaaccggttgaacctattaagccggtgaaacctactaagcctgttcagcctactaaaccggttgaacctattaagccggtgaaacctactaagcctgttcagcctactaaaccggttgaacctattaagccggtgaaacctactaagcctgttcagcctactaaaccggtaaaacctaccaaaccggttgaacctactaaaccagtgcagcctattaagcctgttcagcctaccaagcctgttcaacctaccaaaccagtcgagcctactaaaccggttgaacctactaagcctgttcggcctactaagccggtcgagcctactaaaccggtcaaacctactaaaccggtcgagcctactaagcctgttcaacctactaaaccaattgaacctaccaaaccggtcgagcctactaaaccagtgcaaactactaaaccggtcgaacctactaagcctgttcaacctactaaacttactatctcgacttcactccataaatcatctgataaacttactcaactaactcatcaatcttatcagaattctaaagtgagccgtcaaaacactaataatatatcagttcaaaagaaaaagattttacctcaaactggtacaaaaacaacggatataggcattctcggtttagcccttgctaccgcagcctctctgcttggacttattagcgataaagttaacagaaaaaagcataattaattatcttaaaaaacgttagattaatttctaacgttttttctataggcatttttctagcgttatcatttctactttcgatataatttttaattaagtaagtattttttgaaaggagatcaaccatggttaaagaattcaaagaatttatttctcggggtaacatgatggatttagctgtcggggttattatcggggctgcttttacagcaattgtaaattctttagtcaaagatttaattaatcctctaattggattatttattggaaaaattgacctttccaacttaaaattcactattggtgaagctacatttaaatacggtagcttcttaaatgctgttattaacttcttaattattgctctagttgtcttcttcttaattaagttagttaataaaattacacctaaaaaagaagttgaagaagatcctgcaccaactaacgaagaaatataccttcgccaaattcgtgatttattgcaagaaaaaaataagtaactcaatattttttatcatttaaatgtataagaaaaagcacccatggcttcttgtttatcaattgaagtcacaggtgcttttatatcaagatagacctaatttttcttaaaattaattgtttgtactttatcacccgacttaatagatcctttttgaacgggggagattgaatcaattaagtccatattagtataaacaacaattactgaatcatcacggccactatcagtaatctgttttaaatccatagttccaagtatttgaccagctgtcacatggtcacctttttgaattctcatttcaaaaggtgctccttctaattcaacggtatcaatacctaagtgtactagaatctctaacccttctttggttttaatcccaattgcatgtttagtagggaataaagtggatatatcaccttccacaggtgaatgaacttctccactagtaggcttaatagcgtaaccatcacctaacattttagtagaaaaaacatcatcttttacatcagtaataggtattagttcaccatcaacagcggcctctacttctagtcctttatttttcttcttaaaaaaatcaaacatttttctaacctcttaacccttttaatccaatcaaccctagcaaaaggatgcaaaaaatatacaaaatagtgctgacaagaatagtagccttaaaatatgacacagtaacattattatttttttgaccttgtaaagcgcgtagtccgaaaagacataataatgaacagataatattacccacaaataattgacaaaagaactgccaaatataaaaagtctttaacgcttttatattgttaactaatttatttttatttatccagcaataataccctaagagaaaatcagtaatagcaacaattacggaaatcgctactgctggctgattgtgcatcatatctgctaaacttgctttttccatcactattctaaactcaagaagagcccaataaagtagtggagcaacaaataaaataattgagtaccattttaaaatagaacgagtatttaagtgcaaacgttccataatctgatcacaaaaatcagctactttattcttcgtcgtagtccacatagtctattcctctcttttgcatctcccactgacagtagttagcaattaaaagatcaatgaaggtataggctggactaaaggtgtcattagcagactcttctcctcccagaactttttggaatttcaaggtacgaaagaagaaactataatctactagcgataccaactgtgttggttttaaagtagtaaatgataccatcgttattttgttatttaggagctttatcttactgatttcatcgcgaatttgaatgttatctccgctataagaaattataaacaacatatctcctgttacagctcgccgacttacaattcttaattcttcaattgcagatggcagaattacagctcttttcccaatcataaataattcatgagctaaatattttgctattagttcttgagaccatccagttgaatataaataaattgtattcgcaccttcaatatcagaaaaaatcttttctaaatctaatgtgttatagtactttagcacctcttgatttgcattctctacttcagttgcaatatcaatagtattcattttcttttcatgacttaaatccgataattcaaatcgtaattcactatatccagataaaccaatttttttacataatctaaaaattgatgattctgatacatatagtttttgagccaattttgataaacttaaatgactgcataaggtgggatttgaaaacaaaaatctaataatttctttttcagattcacttaactcgccacttttttcccagacacgtcgtttcaagttagccattattatgttcatccctctactaatgtaagcgttatgtaattatactagtagcataacataataataagcttatcagcgcatggaaatactacatattttccttcatcttatcaataatattctctgcatttaagccaataacaatatcaatttcgttatctttatgagtaatatcatgtgctccaagatctttgaattgtttgctatcagccactttagaaggatcatatacttcaactctaattctagttgagcaaggcgttaacttcttaatattgtcacgtccacctagtaagtcaatgaaaccaattgcttgttcgacctctggatcttgttcttgacttactttggcatcatgaccagcattttccatcaagctctgcattctttccaaaacttgagcaacatcaagaccaacaataacttgaatagcttttccatggtgaaccacattaacagctttattagccttaaattgtgcatcagaacctaatttttctggatctttaaccgttacacgtaaacgtgtagcacaagatgatagttcttcaatgttatttggaccacctaatagatctaagtaagcctgagctctagcaatataaggatcattagcatcaacacctgttgcttgttgagcagctttttgttgagccatcttttctttatattctttcttattgattaatttaacatcttcatcatcagcttcacgtcctggagttacatagttaaatttttcaatcattatcttaaaaataaagtaagtaataaaaccaaatacaatcccaacaatgaattgcattacataaatgtgccagtgatgtgcccaaagtggaagccaattcattgaagcaataccaattgcaccatctgacataagtcctcttaaaccgaaacaccacataaccgtattcatagtagcagccataactgaatatacaatccaaagtactggagctgcgaataaataagtaaagtcaattggttcagtgataccagcaaaaacagaagttaaggctgctggtataagtaatgctgaagtctgtttctttttatttttcttggcagttgcatagaatgcccaacaaataaatggtactaagaaaactttttcattaccgtaaagttggaatccttctacagaagcaatctgtgataaaggttttgtacttgcagcatattcagtcaagtgctttagccaatatggttgaagacctccagcaacaacagctggtccaaattggaacggaatatataccaagtgatgaaggccagtaggaattaagacacggttcaaaaatgagtaaatccaaataccaacaaatccactacttacaataaattgttgcatactgttaatacctaattgtactttaggccaaattaaacaagttaaaaatgcaactggaatcattacaaagaatcctaagaagtaaacatacgttgacccctggaaagttccaagccattctggcaattttttatcaaagtaatgattatgtaaataaacaacaataccagcaataattaaagagaaaacaatgttagtatctaaagtcttgataccagcaatttcagttaaaccaccattagtagcattagcagtaatttgaatcttattaaagtttggtacaccaaagaacgcaccccagtgactcaacatagctccaacgaaatagttaaaagttaagtaagtaatgagggcttccattgcggcacgacctcttgatttgttagctaaaccaataggtaatccaaccacaaaaagcaaacattcttgattaaaaactgtccaaccaccggcagaaatagtgtcccatactttataccacccagttgtaggattagctaaggagccaaaaagtgttgcattattaaatagacttcctaaagccaccacaataccggcaaatgagaaaagcaagacaggtacgaacatagccgccccaaatctttgtagtttctgcatcataattcattcacctcacaagaagaaggacttattaaactaccagattaacaagtcctcctttaataaattcctatctattaagtttctattttagttctggccagtaaggcttgttttctggaatcatatcatcaagtatcttcttagcaacaagtgcatctggaacagtcttattaagtgcaaatgcttcccacatcttttcataagagtgttgttcatatgcatcaacaaccaatttttcacaggtttgttgttccatcatcaatcctctttggaaaattccggccttaccagttgccatcggttcaacaccatgtgaagtaaataagcatggaacttcaacaattgaatcaggatccatatttgaaatagcaccattattagggatgttggctaagaacttttcaccagtgttataggcaatcgcatgacaaatatcgacaatgtattctgagtgagtcgcattacgatcccacatattattttctgcagtaccttccttaacaattcgctcacattcaccaaagacaatcttttgacgatattcacgaatttcatcagtacgagtatgatgcggatcggcattcttaacttcgtattgtggatagtaataatactgcatgtaagtatttggtaaagtatttggttccaaagcgtagcaatcagctgccttcttaaaagttgcttcccaactaggttcagtatctttatcaaaatcgccacctacccagtaaccattctttgaaacatatttcttaagttctggcattaaatctttaccagttttcttgtcccaaacacctttccaccagccaaagtgatttaagccgtagtaattgaaatctaagtcgtgataatctttcaatccacaaatttgagccattcttgtcatgatatcaattggcatatcacaaatattaataacttttgcatgtgggcgaagacgacgacaagcttcagcaacgattgcaattgtatttgagtagttaatcatccaagcattaggtgaatattcctccatccaatcaataatttgaataatggctggaatagaacgaagaccgtatgccattcctccgggtcctgtagtttcttgaccattaaccccatatcttagaggaatcttttcatctaagctacgcatgtgatatttaccgacacgaattgatcccataacaaaatctacatcggtaaatgcctctttaggatcagtagtatattcgaactcaatctctggagctctttccttcataataatggctactgcatccccaattttcttttggcgttctgcatcgttatcgtagaactttaactttcttaatggaaatctatcttgattttgtaataagttcagtacaaatcctggtgtaaaggtactaccgccaccagcaataacaactgaaaacttacgattatctttagtcatacagtttctactccctttttgtgattctctttcagatatatcttgaaaaacttttccttgtttttcctctcagctagcttacacattatttataccgctaaatttttatttaagaaagcgttttcaaaggttaagaattttatttcagatgtttcaaacatcttgtcaaactctgaaatatatttcattttcttagttttagctttttactagaattaatggggtaggaagcttttattaataatttttccaaattaatggtctgtaccattgataagatatttcgcattattaatatattcgtatctaacttaaaaaaataaactattagttttttgtgtcactattggtatttagaaactatttaagcaaaaaatgacagatattaatatctgtcattttttatctataattttaattaatactctgaagcaccagaacttgtatcagtttcttcttgcttcttttccacatgctcttcatgcttagatgcaccagttccagtatcaacttcatccctcttataagttgcacccgttgtagcatccggatcatctactagcttttgaccagtagtttcacagaagtacttcacaaatggataaatatcttgtacccattcataagttcccacgtaatttccttcgtcatcttcaattcgcttataatcatgcaaaattaatttatgacgattgccattaggaactggcatttttacctcatcatgaccatctattttgtttcttaaagcataaataactttcttagcttcaggaattacattgcgaatatctgggtgaacggcgcccattgtatcaccaacttgatctggcgtacgtttggcgagcattttcttatttggatcagttggtctgttataccacaagaattggttattatcatctacataagttaattcaccaaacgcacgacgtaacatccaattaatttggttaacggtaagaagaccagcatccaattttacatagtcgtcgccttctgctgcatgtacctttttagcagccttattcaaccaatctggatcatttttatcgataccttcgaccgtgtatcgggatttgccggtcgcatcaaagtcttctttaatataatcttcttcttttaaatcttgtagccatttaggttctgccattttatttcacctcataaatctacatctcttcaacctgattatacccactaacgaaaaggcttgcaatgcttatatacagtattttacatataaagttggcataatatatatttatggaatatagattattttttaaattaagtgttgactaaaagtaagttgtacgataatatagcttgtgaaaagtaagaaaggagctaatgattatgtttaatgtacgtcaagcaaattcttgttgttgtaattgtcaaaaaaatttggcaattatttggcgtacagtcattagttcattcaagaatttctctagttagaaactagcttttcaaagttataactatggtttttctcaagagctgctggcattaggccaatggctctcttttgtttgcttagaattggagttgaataaagtgcaaactactctcgttgttttaatggccatcgcgattctagctggtatggcttacttacataaaaagaattggggatttactaaattagtattcctctcccttatcgtcggaatcatctttggtgtttcccttcaattaatgttcggtgctaacagtaacattgtaaaaaatagtatcgactggatttccattgttggggatggctatgtttccttactacaaatgctagtaattcctctaatctttgtgtctttagttggagccttcactcaactaaaaatgactactaagattagaaaaattgctaccagtgttttagctattttattaggaactacagctgttgcttccttcttaggcttcagtagtgtcgctatttttaatttaggtggggctggctttgctaaaggaatatctgcttcctccactgctcttacctctattaaagatcaccaggctcaattaaaaggcttgacccttcctcaacaaataacatccttcttcccgcaaaatatttttgcagattttgctggaatgcgttcaactagcacaattgcaatcgtcatcttctctatttttgtcggaattgcattcttacagattaagaaggaaagagcagacgttgctgctacatttgcacgtggtattcaagccctacgtgcggttatcatgcgcatagttaagattgtacttgaactcactccttacggaatttttgctttgattgctagaactactgcaactaacagttttgtcacaatgagtaaactactaatctttattgttgcagcttaccttgcgattgctgttatgttcattgttcatgcagttctacttttaattaacggaattaatccaattacctacttcaagaaagcatggcccgtcttagtctttgctttcacttctagaactagtggtggtagtttgccacttaatgtacgtactcaacgtgaatcaatgggagtaagtgataccattgccgactttgctgctagctttggtttaaccattggtcaaaatggatgtgcaggtatttatccatcaatggtagcagcaatcactgccccacttgttggagttaacattttctcatggcaatttgttttaagtttagttgtaattgacgttatttctagcttcggcgttgccggtgttggtggcggtgctacctttactactctaatggtcttaggtgctcttaacctaccagtaacagttttaggtgttttaattgccattgacccagttgttgatatggccagaactgctcttaacgttaatgattcaatggttgctggtgttattactgctaagcgaaccggagaactaaactggaatacttttaataatgaaaaatctgatgtagatgctgaagttgaataacttagctaaaaatttttattgacattattttttaagcgttgtaatattatgacaacaaaattaattaaagcttagaaaagatgagtaattacttaaagcatcccccagagagtcggattaggtgcaagccgatgttgctgacgtaatgaagatggtcttggagctaaattaaagtgcaagctaatttaagtaagcagtttacgattgacgttcgttatcatgtccgagtcttccaaattttggagtactcagtgaggaattaattgtaagattaatttgaatgcagggtggtaacacgctattaagcgtccctagtgtagtttaaaaactatacttggggcgctttttcttttgcttaattagtttattaaattcaaaggagggattattttgaatatcaaaaaagaatattttagtgaacaggtattttatcgaatgtgtggtttttatttcatgatccctcttgtcagcggatcttcaaattaatatttaaaatttctagttagaagatgaggtagctataatgacaactttaacccattacgatattgttggtagttttttaagaccagaagaattaaaagaagcaagaaagaatttcagccaggaaaagatctcacaagaagagttaactaaaattgaagatcaagaaattaaaagattaattcaaaaagaagaagaattaggattaacagcagtcacagatggtgaatttcgtcgtagttggtggcatctggatttcttgtggggattaaatggcgttgccaaatatgattacaaagaaagctataagttccacggtgctaaaactaggaccgataatgcagagctatctggaaaaattgcctataatcctgaccatccattttttgatgcatttaaatttgttaaggctaatgtaaaaaatgcagttgctaagcaaactattccttcccctactctcctatttagggacaatcgctctgacaattggcctaacttctacgataataaaaaagattacttagacgacctagctacagcctacaataaaacaatccaacatttttatgatttaggttgtcgctatattcaaattgatgatactacttgggcttttttgatcagtaaattaaatgaaacgcaaaatgatcccaaagaacatgaaaaatacgttcaaatagcagaagattcggtttatgtaattaataaatcactagaaaagctccccgatgatctaacagtcgcaacacatatttgtcgtggtaatttcaagtctacttttcttttttctggtggatatgaaccaattgcaaaatatcttagtcagttaaactatgaccgctttttcttagaatatgacagtgatcgtgctggtgatttgaaaccaattaagcaaatttggaataatcgtgataatgtcaccatcgttctcggcttgattacttcaaaaaatggacagctagaaaatcctgatacaattacaactcgaatcaaggaagcaacccaattggtccctttaaataatctggctctaagtacccaatgcggttttgcttctactgaagaaggaaacattttaagtgaagctgatcaatggaaaaagattaaatttgttgttaagatagcaaataatatttggaaaagtttttaacggagggaaatattatgggtaaagttgaaagttttgaattagatcatactaaagttaaggcaccttacgttcgtttaattactgttgaagaaggacaaaaaggcgataaaattagtaattttgatcttcgtttggttcagcctaatgaaaatgcaattcctactggaggcttgcataccattgaacacttattagctggattattacgtgaccgcattgatggttatattgattgttcaccatttggttgccgtaccggcttccacctcttagtttggggtactccatcaactaccgatgtagctaaggcacttaaagaatcacttgaggaaattcgcgataatattacctgggaagatgttccaggaactacgatcgaatcctgtggtaattaccgcgaccactctcttttctcagctaagcaatggtcaagagatattttagaaaaaggtatttccgacgatccatttgagagacatgttgtagaataatttttctgaataaatataaaaatgcattattactaatttcaaactagtaataatgcattttttaattatttttcttatatctattccacaaaactatattgccaatcactagcatacatacccagattaatgctagaactatattgttttgataattttgtttattttgaatattaacccaaatcacactaaagtatattccactcagaattgcacttacggtaacactagttaagataactattaaatttggtatttttttcttatactttagcagctgaagccaattgtagaccatctcacagattacaattaacactaccagtaggtcataccaccaatcttgctgcttaacaaacatatttatcgtatcaataaaataatagccacaaataattgcaaataaatctaaagtaagcaattgtcctacaatggtgttcttttctttttctttcataaaagttcctttataaatctttattgttacttttaattatagaacaatagccttcatttcagtattaaaaatactaagacgattttttaggcacttaagatatggaagtaacttaaaacaattcctaaaatcaaaacaaaccagatcatcttagtggatgtcacatgtttctttcctagcaaccagtaaactaaagctacaagtaagacaggtactaaggatggcataatttgatttagaattgtttgcatctttaatgttactttgcctgctcgatatacaaatggtactttaacattcactactgttggtatcaaagccccaacgacggtaaccccaagtaaaatagcagagtcggtaattgcatttaacttacctgaagcagaatcaattaattttgctccctgtgaataaccgaggtttaaaaagccaaatcttgtgaataaaacaatcaaattaacaattatccacaagaaagctccaaaaggatttcctcgtaatcccatatatgcaccaattgatccacagattgtaggaataatagcgccaaaaattgtgtctcctactccagctaagggtcccattaaacctgtctttaagccggcgattgtttctttagctttacttccctgcttttcttcaattgccagatccattccaatgataaagtttccatcaaatgcattcacgttgaagaattgggactgcatctgcatcatttcaactaattcttcatctttgtaccagcgctttaaaaatggcaaaacagtgtaaaagtaaccgggagccatcattttttcatagttccaagataattgactagcccagagccaacgccaatttgctcggaaaaggtctttttttgttaatttatttgaattagttttcatattctccctcttcatttgtatattcttcgctctcagttactttttctgaactattttgttttgtatttaatttttctacttcacgagtgtagtggagataagctaaagcggctcccagcaacgctacccctagcattggcatttttaagtaagccgctgcaatgaagcctattgctaaataagaaataaatcttttagttggtaagtatctaagtaaaattgcaataccaacaattggcaaaatatgccccgatacttttaacccatcagtcaaccaagctggaattattcgtagaattgctttaacaacatcatttcctactacaagtaagataaaaactgggattgcacgtgaaaatccccaggtaaatgttccccacaatgcatttcttgctgccgcatttggcttattttctttaataaaagtatcaattcgatgttgaaaaatagtattagcaaatctggctaaaacatctagttggaccattaagagtcctactggaacggccaaaccaattgcaaactgcacaccttttcctgaaataacggcgtaaactgtaccaacaattgcaccagtcataaagtccggcattgaggctcctccatatgttgagacccctaagaccattaattggagcgttgccccaactgctagcccagttgtaatatcacccataataattcctgaaatcatcccaattgctaaaggattattcacaattgatacagttaattgatcaataattgcccaaaatgctaggcaagttagtaataaaatctgccaccattgtattgtcattgtcttatcttccctttacttttctaataactccataaattcttctttgtcttctgccggcaccatttgatgataaagatgacaaccatgctcatttaagtagttaaaattatccacatcttctgcagtaacagccacactcttcgcaacttgacgtgaatcagccttagtagacatatttcctacgttaatttcaggtaaattcaccccattatcaaccatttgacgtaaaacaccaggatttttaactaacactaaaacggtttggcctttatattttccttcattaattcttctggctgcacctttagcagtcaaaatacttaagtgaacgcgatgcggacatgcggtctttaaggctgttttttgaatatcattttttacgatatcatctccaactaccataattcgcgttaatcgcaatgcatttgtccacatcgtcgcaacttgtccgtggataagtcgttcatcaattcgaacgttgtgcatagtttgtggttctacttccgcatttttatttaattcgttactttgatgagactctttcttgtttgaggtggccttatcttcagttggctttccaacaggcgctatattttctttagcttgtttgattgcttcctccatcggagttcccattactgctgctagcaaaagtggcaaacacagaccgctgtatacttttacttcaggatgttcttgctgatagcgtaatgcagcgttagcaggagttcctccggcaatatccacaataatagttggcacttgttcaaaaccttcggcagtttgagcaatctcataaagtaaatcatcttgattcattgtttgtttaaaagcaatcgcttttacatttgataattttcctgcaatcatttcacagctagctagagttgccttagcgtattcaccatgactaactattaaaaagttatccacatttaattcctccagaattcacaatgtttatattttatcctaattggtatataaattaaagctaaatatagtagtgtttatagctaattattcaacattggtatagttcaattctattgttttgtgcttgtaatcgctgtcattgttgatacaaaaagaagaccctacttggcaaaagtagagtcttctgaaggaatataactatgaaaattttatttaatgaaatattatttaagaatttaatttttgttgatatatgaggattataggaaaatttattttaattacttagtaaagccaacatcgtaccatgaatttgcagatggcttaagtgaccagccagttaccttgttgttaactgcagttactgaccaactgtttgtggtaggtacaacataggcattgtcatacatccattcttgccacttatcaaatgcttgtacacggtacttgtggttgaaggccttagttgaatcaatgttagtaagaagtttagattgagttggagaaacaaaacgagccatgttgtatggagcaccttcactgtaaaggtccattggtgatggttcagatgataaactccaaccaccttcaaagacatcaatcttaggactatctgcttgaacatcttgtacccaagagttgaattccattggacgaccaccaacaaatctagcatctaagccgatcttttgccattgttggaggtagttagtccagatcttttcagcgtttggttgtgtattacgaacagcaacgttaatagttaacttcttaccatttggttgacgacggtatttttcacccttacgcttcttgtatccagccttgtctaacaattcattagccttcttcaagttgtatgggtatcccttgatactcttatcagaaaagtcgccaaattgtgctggaattaatgtgttaattctaaatgacaaaccattgccgtaacgcttggcaacagcgtcaatgttcattgcgtaagccattgccttacgtaatgagacattgttcatcttagcgttcttatcctcaacgttcttgccagtcttcttgtcaaacttacctactttaaagcctaagtagttgtaagatagaggaatcttaccaatgaagttaacgcccttagtatccttaacattgttccattgagtgttaagcacaccagtaacatcaaacttatgactcttaatagcttgagaaacagagttagttccgattacttccatagtaaccttgtctaagtttggcttaccacgccagtaatgttcatttggtacataagtaactgattgaccacgaacaactttttgaaccttgtatggaccaaagaaaagtggttgtttacgaaccttatcatctgataaaagtttatcaaatggaacgtctttcaagtagtggtatggttctgcactttcaaggaagtaaccattaccagattgaagcatacctggtttcatttccttaaaatgaagtacaacttttcgaccatcttcaccatttggcatttcaataccggaaatcttgtcgctctttcccttgtggtattcttctaaaccaactaggttagctaaagaatccgtatatcttgaagtcttggtcttaggattaccaacaatttcgtaagcatattcaagatccttagcagttacttgcttaccgtctgaccacttaacgccatctttaacttcgatagtaattgtcttagcgttcttatctaacttaaaggtagctgcacccttattgttgatcttatagctgtcatcagttgtaaataaaccttctaaacctggtgcttgaatttcactatcagtagcagtatcagataattctggtaagaaaatacctgtgaaaggtgagtcactttcaattgcgtactttaatgttccaccttttttaacttgtttcttaggaactgcctccttaaaactaactttcttatcgcttgcattattgttgttgttattcccacaagcagttaaagttaatgccgcaccggacaatactgtaattgctcctaaccacttaacttttttcataatttctccccctttatgagatgacttaaatttcttgtttttgattatatgatattaaaatgaaaaaaaacaatataaaattaaaatattttttgatattttttgctttaattaaaattgcaataaaatatatactttatgtagtctatcaaggctagacactactaaaataaattcaagcaaataaaaactgctatattttcctttttaaagcagaaagcatagcagttttttcatatattttttcttaattaagattttttaatatttcttttaggagtaaaatttaaagccaaaaccgccccaataactaagagggttcccagccaatccatcccggacatcactaaaccgaaaatcaaaactgaacccactgtagctgataatggttcaaaggcatctagtaaacttacagtcgatggttttacgtagcgtagagcattagccataatttgaaatggaataatcgttccgataataattattgcacttacgtccagccatgctctaggggtatttggaattgccggaaaccgcggatatacaatcatcaacccaattcccgcaaatagcattccccatcccgttacgactaaacttgatactcttttaacaagtttaacgggaatcagtgtatagcttgcctctccgacggcagatagcaatccaaaaaacaatgcaagaggagtaattgctaattgattaaaattcccatgagttgataacaagaatacgccaataaaagctaggatagcagctaatacatccaattttcttaatacttgttgatgagtgacagccaaatatgtcaagacgaaaaatggtccaataaattgtaaaatcgttgcaattgatgcgtttgccatctcaattgcaataaagtaaaagacttgtactggtaacaaaccaaaaatcccataagcaataatatgaagagtatttttcttatcttttaaaactgaaaatggcttttggtgtaagactgtcgcaataattaataaaacaatcccagagataattaatcggacttgtgttaaccaaatcggtgtaatcttactactcactttaaataaagattctgcaaacaatccagagattccccacattactgctgctaaagcagctaaaattgtccatagcctactttttgactgtttatccatccaacttttcctcacaaattaaaattgatctaaatcatcataacatacttaatctgtgaatttacttttctctaaagtgattactcacacatattttaatgaagaaaattctgcaacaaaaaaggtggttctatgaccacctacaagacgtcttttggcaagtaatgagcttacctttgtcgcgcgcctgctcaacatactttaattgctagttatattttagcactttagagcttatttctcgcttcataaaaatactgcccgaaaaatcgagcagtatttttttaattcaactaatctaaatcttttccattggattcaataactttcttataccaatagaatgaatccttcggtcttctttctaacgtacctttaccatcatcatcggctacttgaccaccgctagaaaagccgccttcttttaagatagagtcataaacatcagctacttcgttgccaataaccacttggtattggccacctgctttaacaacagttactacaccatctgtgtcttttaaggcatcatcgtttgcctttttctcatctttcaactaaaaacgtaaacgggtcgtgcagtgaactacactaatcacgttgtcttttctgccaacgtctttaataattgtttttgctagaccatcgtaattcttagccatagctctttcctcccaataataaaacccaagctactcaaaaactaaagaacataactgttcagtgtctttcagtaacttgggttcttgcctaatcgaattagtaacatacctaagtatgaaatatttatttttcttgacgactcgttacccgccaaatatgtaaaacaaggtagaactcatcgtctgagtttaaagtccatccttttttactatgtaaataagttgcgattcgttcagccgtatcataagcatgattatacttaatcttcataaatcctaatagagaaccatcaagttctcagctcttatgatgcttatttcttaaaagtcttactaataatactctcaagtgggtaataaagcggctatagttaaatgactctgtatctaatgtcatttgatattggtattgaataatatcaataattccacttattaattcagttatttcaactgtttcttgcacttgatcattatcagatgccgcattaacaaaatgataagtcataaaaatgctttcacttactggcaagttaaccttcatttctttattaattaaagcaataactttttcactaattttatattccttaggaaaaagattcttaacttcccaacgtgtattggcagcactaatatcaatattatcttcaattcttgaaagggcaaaatcaatatgatcagctaaggccaagtattgaaagtcgttgaactttacattcaataaaggttcaaccatctggatcaccttattagttaaatcgatggtcgaagcgtttatttctttaacttggttaacctcatcttgatgagagttagcaatgaaacgtctttcaactttgctctcatcaatcttatcacccttttttaggccaaagccaacgcctttacctagaactacttgttcttgaccttggtcgtcctgaaccaaggctgcactattattaaatgttttaagaaatatcatccgacgaatcacctttatatagaaaaaagctaccacaaattagaatatacctatttaagtatatcatctttatttgtagtagctcagacctgatcgcatcagtaatccgcttatttacaataattataatagcgcttacatataattgtgtcaataagtatttaaataaaaatacttatcgctgattgtaaaattaaattgaacacttgataaaaaataaaaagtccattcggacctgtttgatagaatgttaataaccacaaaaactttctattggaggtcaaaatggactctttacattctaccatgaaccagcacgttaaaggcaagcatttatcatttgaagagcgagttattattcaattgcgtttgaaagatggctattctttgcgtgcaattgcccgtgaacttaactgttctccttctactatcagctatgaggttaagcgtggcactgtaaaactgtatcatggtaaagtcaaaaaatataaggctactcaagggcatgatgcatataaagctcatcgtaaaaattgtgggcgcaaatcagactttctcaggaaagctcaattcatgcgctatgtccacaagcatttttttaaagatggctggtcgcttgatgtgtgcagtaatcgtgctactgctgttggcgaattcgctagcagcgatgttgtctgcaccaaaactctttataattacgttgatcaaggcttattaggaatttataattacgacttgccagagaagcttaaacgcaatactaagcttcatcgtattcgcaaaaataagaaaaaacttggcagaagcattgaagaacgtcctaaagagatcaataaacgtaatgaattcggtcattgggaatgcgatttagttctcggacataagagcaaagatgatgaggtactgctaaccttatctgagcgtatgagtcgtgagtttttaattcttcgtattcctgacaagacttctgtcagtgtcatgcaggcctttaaagaactccaaaggcaatacagcgaacattggaatgatatttttaaaaccattaccactgataatggctcagagtttgcagatctttccaacctagaaaaagtatccaatacactggtttactatgcccatccttacacttcttgtgataagggaacagttgaaagacacaatggtcttattcgcagattcattcctaagggagaagcaatagctaactattctttacaagacatcattaatattgaaacctggtgcaattctttgccaagaaagatactggcctatcatacaccagatgaaatctttgaaagagaattagatctaatctatcaagcagcttaactaaaagtgttcaatttattattgcaatttgcgtaaaaatacttatttttatgcaacaaaaaagaagaggcgtctagtctcttctttctttgtctatatttagaatcaaactttacaatatttacttatctctacgcttcttaccagcgcctaagccgaacaaactacctactgctgcaatagctaaacctaagataccagctgtattttcagacttagcacctgtttgtggcaaagtagccttttcagaatgcttaatttgttgtgctggagttgcagaagtcttcttttcattattttctgcaacatgcttagtaataacttgagcagtattgttgctgttgttttcctttgcgacagcatcgacatataccttaactgtcaagtctacgcttgaaccatctgggtaagttactgtaataacgccagtgtgttcaccaactgtattgatatttggtacttctttccaagtgtacttagtacctgctggcatttcatccttgttcttaatagcatctgctgagtttggaagaacgcctggagtagtgtgaattggttgtgtttctggtgttacattgtttgtattaacaattaccttcacagttacttcgtcctttgaaccgtctgggtaagttactacgatcacaccagtactttcacctggcttagttacatctggagtcttctcccatgtgtacttagtgccatctggtaagtcactcttgttcttgatgccttctgctggatttggtacaacaccagtcttagtattcacatcttgaccttctggggtgtacttgtctgcgtcggttggagttgctgggttcgttacgtggatggttactgggacttcgtcctttgaaccatctgggtaagttactacgatcacaccggtactttcacctggcttagttacatctggggtcttctcccatgtgtacttagtgccgtctggtaagtcgctcttgttcttgatgccatctgctggatttggtacaacaccggtcttagtgtttacatcttgaccttctggagtgtacttatctgcatcagttgttggattggttacgtggatggttactggaacttcatcctttgaaccatctgggtagattacaacaatagttgctggcttgtctcctgcagtagttacatctggagtgtctttccatgtgtacttcgtgccgtctggtaagtcacccttgttcttgataccttctgctggatttggtacaacaccggtcttagtgtttacatcttgaccttctggggtgtacttatctgcatcggttggagttgctgggtttgttacgtggatggttactggaacttcatcctttgagccatctgggtaagttacaacaactacagctggtttattaccttcagtagttacatctggtgtgtctttccaggtgtacttagtgccatctggtaagtcgcccttgttcttaatgccttctgctggatctggtacaacaccggtcttagtgtttacatcttgaccttctggggtgtacttatctgcgtccgttgttgggtttgttacgtggatggttactgggacttcgtcctttgaaccgtctgggtaagttacgacaactgtggctggcttgtctcctgcagtacttacatctggagtgtctttccatgtgtacttagtgccatctggtaagtcactcttgttcttaatgccttctgctggatctggtacaacaccggtcttagtattcacatcttgaccttctggagtgtacttgtctgcatcagttgggttcttagttacagttacagtaactggaacttcaacagttgaaccacctgggtaagttacgataactacagctggtttttcaccttcagtagatacatctggtgttgtcttccaagagtacttagtaccatctggtaaatcacccttgttggcaataccttggtctgcatctggtacttcaccgaccttagtagttacattttgaccagttggagctactggattataagtaatgtcaacagtagcattcttagtttcagcagtaacttcttcagcagctactttagcttgacttggagtgtaacccttaactgttggtgcattaaattctgcccaagtaccatttgcctggttaagttcacctgccacatgccatacagtgttatagataaccttgccagttactggatcgatgtagccgctattaccatccttatcttcattagtgaagtgaacagtttggtagtgaattactggatcttgacctggttcatgaaccacaatcgtacgagttacgtattggttcatggctttttgacctggcttgtatggaactggagttgaatcttcttttacataagttacattaacagctgcaccatttactggttgaccatctttaagtgctgatgctgctggtacttcagttgacttaacaccatcaacatatgagtcgtaacccttaatttgtggagcattttcagaagcaaactctgctttgccaccttcaaagaacttgttgttttcaatattaccaactttccagtctccggtaccagttactacaccagttactaagtcttcaacaccattacgtccgaaatcaacgtgttgagtatcaatcttagtcttagtttcacctggtttagtttggtaaatgtcacgacttacagtagtgaacatattcttgtatttaggatcagttgggttaacacctggatcagttggagtaatatccttagttgcgtgttcaaccttgtaatctacaggttgtggatcatctgaaccaaacttgtaagaactgatagtttgttgatttggaactagtttccagttagttggaacatttccaggtacatcaacattaacagtttcatcagtcttaccagggacattgtatgtacctaccacagtcccattaccatcaacataattaattactaaagtatgttcgttagcagtataagttactgtgacagttgcaccgttttgtggttcgccatctttttctgttactgcagctgctgctacttcggttgcttttgtaccatctacgtatgagtcgtaacccttaatttgttctacactagttgaagcaaattctgctttgccactcttaacgtgccatggattccaagtcggcttacctgtgactgggtcttggtaacctgcgacaccgttaacatcacgagtgtattctacagtttgcgttactggagcaatggcttcatgtcctgttggtacttcgtagttaatagtacgagttactgacatgtcatctctagctggatcgtatggtaatggttgggcagcttgttttacataagtaatcgtatcagtaatattacttgaatctggatttactgttactgctgctacttcggttgccttaacaccatttacatagctgtcgtagcccttttgttccttaatgttgtaaactgggaaagtttcactgtttgagttccatgcgttccaagtagtcttcccagttactaagtccttcacaccagtacgttcaaattcaactgaggcagttcttacaaccttcttatccgcatcagtcttaccagctggtacttcttggatggtttgggtaatcttccggtaagtacggctgtcagtcttgtcaactggaacaacttcagtaccgtgttcaaccttgtaagctataggttgtggatcacctgaaccgaacttgtaagaactgatagtttgttgatttggaactagtttccagttagttggaacatttccaggtacatcaacattaaccgtttcatcagtcttaccaggaacattgtaagtacctactacagtaccattaccatcaacataattaattactaaagtatgttcgttagcagcgtaagttacattaacaacttcatttgatgaatcttcagtaattcttcctgaagctggaacatattgcttaccatcaacagtttcaatatttgcaccagttgcagtagcagtgtagccaggcttagttacttcatattgtgggaagttagttattgcttgaccttcactattcttagcaggtgcccatgcagtgtaactggtttgttgacctgctggcttagaacgatcagtcatcctagcacgactataaattacgtgttgaacaactggagtactttcaccttcaacattaatcgtacgagtaatatcacgataaatgtcgtcagtcctatcatcaacaccttgatcaaccttgattacatttacagacactggaacatcaaggtaactaccatcagtaaagttgatccggacagttgcagaagcattagcattagctttatcaagacttggtaaagtttgccagtcaactgaactaaatttagcattatgatcagcagttaaatcactagtatttacaagctttgaagcatcccctaaagcagccttcaaatcagtagtatctgagtaaacacttggaatagtaccattagcttcggcaccgtaaatgtaaactgatgggaatggataagttgatactggacctttaccataaattggccagtttacacttgaactgttaacaacagctgaatacttaggataaccaaattgattattgacccagttagtataagtaatcgtcttggttccaccattgttggctgatgacaaacttgttggttgaccattacccttgattgcacctaatgcattattgaatagaacagtatctgctttagtccagctaatcttaatgtcactagcattaatagattgtggagcagtaacagttacaccagctggattatcaccagtttgggtaagaacatatgcagtcttatcagcattcaaagtgtaaatatatggcttactgtagctttgaccaccttggtagtagcttaacttaaagttttcaattactggtccaccaataatgttcttgtctgaagtcttgtgagttactacatcattagcatgcaagctgaaaacatgaccattatcgataacagtaacatcaccttgaccatttacagcaacaggaatagtaacggtctcagtagtaccatctggataagttactgtagcagtgccagtagttgcacctggctttgaagtatctggcttagtagtccaagttgcacttgttggataaccatcaactggagtagtaccaccattattcaagttagcaataccttcagtagcagctggatctccaccaacagtagtagtaatagtcttaatctctggcttagcgttaacaattacattagttggaactgtatcttttgaaccatctgggtaagttaccacaacaactgctggtttcttacctggtttagtggtatctggaatattttgccaagtataagttgtgccacttggtaaactaccaggattcttgatacctttttcagcatcaggaacttcgcctaccttagttgaaacgtcttgaccttctggattatggtcgtctgcatcagtagttaccttaattgaacttgctggaatgttaatgttcaagtaagttggttgaccatttgcatctttatcagtaaaggtaatcttgataacaccgtcttgaccttgtgcattaggcttagttgcccattccgtctttgcaatttcatcagttgggatgttgttatctactaattggctaaattgttcactagtcaaatccgaaccaaggacaatattaactggagcagttacagtcttagcaccagcccctttagcatcaatggtaaatgggttagtagttacaacaccattctttgagccaagtatattcttagttgcatcattatcagtaaagtcaacattaacactagttgtgatatctttacctgatgcagttgcggtagcaacattagtatctggagttgtagtccagcttacagtcgatggagcaatagtaattggagttgctgtagttgaaagtttaccatctgttaattcataaccttctgcagttacgataccaactggtgagagaacttgtgaattttcagtagtttcgtgagcgttaagtttagaagtgtcaacgctagttacaactgcaccattatcaccccaagttactgtttgaccagctttagtaacaattactggaacagtcgtttcactagtactagtgtctgggtaagttacagttactggaatattgtaagcacctgtagttacatctgtacctggcttaacagttacagtaccagttgatgaattaatagttgcccaatcaggtgtatcagtacctgtagtaaaggtcgtgccagctggagcagtaatatctttgccatcttgattagtaaatgacggatcatcagtagcagtttgaccttgttcaacatttactggtttatacgacggagtatattgattactttcatctaagtttgaaccaaatttaactccagaggcattccaccaactaaagtggttaataaaactattcaaagctttcgaagcggtagtttcatttccttcaggaacaactgcaccattagagaagctattagatcctggatcggaggccatagctgttaaggtaacttcattaacacctttggctggagtatcgtcattaactgatccattcatatattcagaaccggcattgttccaatcaccaaaatcgcgatatgaacgaaaggcatacgcatagtccccaccttgactagtattattcaaatatttaacattccaagttaccggttttgtttcaccagctggaattatagtcaatggagtattgtaggtactatcaggtgaattaattacaatgtgggtctggtgatatgcatagtctcctgcaccttcagttttaattaaatatcctggtttattaagtgcagtacgctgtaaattaattaacttcgcattgctgaaattaatgtagttttgactgctcgttccccacatagtcaaaatagctggccagccaccccaatattgactcttagataaggtataggaggaaggtaggtaagatgagtaagctgaatcttgcaaattcaaactaccatcatttacttcaagatgataaatttcaccatctccactgcttggtcccattgcaagtaaaggagcatcagaatcagttaccttggttctaatgatagaaagaacagcatttggactaattcttactgtactgtcattagtgtcaccatcatagtccaatccgactaagccagcggaacggaagccggtactattcatcttgctagtagtaatttttaatgaagctgaatcttgcaagtcaaggttacttgcattattaactcccattgaagcgccagaacctaattccatggttacttgagcattaggcattaaacgaaatactccagaagttgcattgtcaattgtttgatcgccagcaccattagcaaatgaaacacctgccatatttgaagtagcttcactgttaaaatcaacttgcgcactactatcaacaacaacattacctgaagctaggatatctgctaagttacttgaactattattatttgcagtaaatacagtagacccattactaaagttaacattgtttgcttgaattaaagcggaactcgtaatattcgaattagttaaattaccttgtaatttattctctccctcaaaattaacgttaacattaggatacgaggaagcagttgaattattaagtaattggccggaatctttacttgttgtaactccattaaaggtcaatgtactatcattagaggttgcactgttaaaccaaaatgggccatatccactagttgtttgaagatttagatcctttaaaatgacattccaattgcgagtaggattgcttgcgtttggctcatagtaggtattactgtcaagatcaatatagttttctcccatgtttaaagaatattgcttttgaccatcaattgttactgtacgagcaattccatagttatttatatcctgatagctaccattatttaaattagcattactaaaatcaatattcttatctaaagtaattgtacttacatttttattttgtaaagcgtttaagaattgagaataatcattaactgattctgtttgattattagttgcttgaacatttgccttttgaacaattggctttactgtattattttgattacttgcagtcagattcgttttttctgaattttcagtttgactatttgctacacttttatttaaagtttcttgtgaagtattattagtagtattgttattaactttagtttgaacagcagctggtgattttacagtattaactacagtattttgtgattttacagtactattaactgcagtattggtagcatttttccccttctcattcgaaagtacttctgctgttttgtttacttcactcccattttttacatttacactatttggagtaactgtatcggcttttacgctttgactgtctacgccaattccaaaaagagtaaatccaattaaaactgaagcagctccaattgaaaatttcctaattgaaaaccgctcttttttgttttccattttacgaatttttcttgataattatttctggataacattatttgtctcctccacaaattaagtaagccttttcaccacacaatatagaacctcatttactgatagtcaagaattaagtaacttatcttatttaataattgataccttatgtttcatacctaataaagttctatacttttccagtcagataattataaaagctaaaaacagcccttatttttataaggactgtctaaaatcgagtgagacaaatttagcaaaatttttatatagaaaaaggaactgcttttacacagttcctcctcgattatctagtaatactatctgcacggcctttataatcaccattttcagttccaataattaattcttcgccttccttaatgaaatctggtacagttacaactaagccagtatccattgttgcaggcttaccaccaccagcagcagtagcaccctttatttctggttgagtttctttaactgtcatctttacagtggatggtaagttaattccgattaatttaccttcatcagtgaacttaaggtctacttcaatatttggcatcaagaatttagcttctgaagctaaatgttctttaggaattaaatattgttcataagtatctgtatccataaaaataaagtcagtgtcatcatcgtaaagatattgtgcttttttcaaggaaacattaactaagtctactttttcacttggacgcattgttttatgcacaactgcaccactcataacatcacgcaaatccatttgcataactgtattacctttaccgggtttgtggtgattactctttaatacttcaatcaacttaccatcttgattaaaaatcatacctttttttaattcaattgcttgcattaacaaatacctctaaaatttcttaatatacatatcactaatttcatgattaccgtactttttaataatcatgtctgctcgttttttagttggttcaatatactcgtgtaagttctttaagttaacatctcgccagacttttttggcaaaaatatccgcttgttcacgtggtacatgagcccattgataaaaataattgtccggattattgcgattaatttctaacattaaatgatagcgatcaagataccatctttctaagtcttcttcactagcatcgagataaatcacataatctaagaaatcacttggcggtgcttggccgttaggaggaacttctagtaaatttattccttctactactaagacatcgggttgttcaaccgagccaacttcattaggaactagatcagaaatttcctgtgagtatagtcgatatggtactctttctttaccagctttaacacttgacagaaaagtagaaaaggcatcccaattaaatgatactgggaagcccttttgatccattaagtttttagctttaagttctgcattagacattaaaaatccgtcagtagaaacttgagcaatctttttatccggttcaaggcgttcaaataaccgcgttattttcttggcaaaggtggacttaccaacagcaacagatcctgttactccaattataaaaggaatcttttgccactgttctttataaaatgtttgttgagtatgataaacagcatttttttgactcatgatatattgaagattcttcatcatgaaaatttctgcactaaattcatcacttggaggaattaatgcctgccacttatcaggtgtcaagtgtaaaaattgctcttgcataaaaagcccgccttccttctgccttgttcctagtatttttacattgttcagcctatcatatatattgagagaaagaaaagaagatatctatgaaaaaaattattctttttggtgattccttacttgcagggtatattgatggacacgcaactaatattgtaactcaaggactgcaagaaaaattacctaattttacaattattaataattctgtacctggaagtacaactgaggaggcaattgacttttatgatttaaggattaaacctttcaattacgacttggttatacttgccttaggtactaatgacgcaaacatgcaatttggcttaagcgctggacgctatgcacataacttgcaagttctagtagatttaattggtgtcgacaaaacaattttaatgggaccttcctatactaattggaaaatcgccaaagatcaagcatggccaaaaacattacaatttgaattagtagctgagcaatgtcatatcgaaaataatattccattcttaaactttgcaaaagtaatgcgtaagaccggtcatccaaatgatttacttcagaaggacggtatccatttaaatcaagaaggtaacaaattactaattgaaaagcttgctgaattagtcaaagagaaagaaacagctgctatatcataaaaagcatcccaataacgggatgcttttttactgctctattcaatataaagtgcttgtttaccttgctggttatagcttgcctctatcttctttaagcttacctttttatttttaacgccataaggatcatttacatacacaatcccctttttcttgttgtaacctgtaatcacacaagcatgagatgacggcgttacgtgaacttttccttgcttagtagaccaggtctgcatatcatttacacgatcaaacttcaaagttgtaatgattactacaggatgtctcttagaaactaatttcaatacctgaacaaaatcattacctgtataattgcggattcgctttgtgtattttctagccacattatataggggttcattatacacacaccagcctgcattcttgatactcatgtaaccaacaaatccaacgtgtggatttcctcgataattattgccaacaaaagacgatacatgcttgatattcgatgacaactctaatttacttacattaatatcatagtatttcaacaacatcgcaagtgaggtaacctcacaaccatttggtaagtctggtaattggtttactaagggaacatttaacttctgttctggttttaaagtaagccaatcatattcattttgaaatcttttaaaattaaatcctaaggcaattaccccagcagtaattaacaatataactgtatacagaattcttcttctacgccgatattttctggctctatttaaccttttcatgctaagtattttaactattatgtattaagtctgtcaaaatgcataagaattaaatagaattaactttaaattcttatctgcttacttgaataataaaaaatccctcttaccaagatctaagagggattttatttttacttatttacgtaagttttttcatctaaattatcaaacaaagggctcttctcacctgtataaatcaagtctaatttatacattgcccgcgaggcaatggtgtaaagcaattgagtttcatctaattgatgataattttcttttgaaacaccccaagcaactactgcatcaaattctagtcctttagcaagataggatggcattactaaagtacccggtactaaacgctggtttgccgacccaattaaagttgccttaatctttctttcttttaatactttagcaacttcttgagcttcagccaatgtcttagtaataattgctgttgttagcttttgttcatcgttttcggccaatatatcttctaaggcactgtattctttttcaatactatcgcgcttgtaaaaggctggctttggaccacgtctatcaaaagcttcaatcttttcaccttgacgcaaaatttgcttagtgaagttagttatttcctttgttgaacggtaagacttggttaattgaacaacatccgtcttttcaggatcaaacaatttagagatttgactcaaaagtgttttactttcatctttagtaaaaatagcttgattcaagtcacctaacatcgtgaacttagctctagggaaattgtacttaagatatgccaattggaatggagtgtaatcctgaatttcatcaataaaggcatagcgcatttcataatctgttctacgtccagttactagatcatataggtaaaggtaaggagaaatatcggccatcttgattcttccagccttaaaccgccctttaacattttcaatatgagcatcccactcctcttgagtaatgtcccatttacttaagtcaattatcttaggaacggcacgtaaaaagcgtaagtattgtgcacgaatatttaaaaagcgattctgacaaatcttgcgactaacttgctttaattgattaattacaatcttacgagctaaaaagtgctcttcttttgcactagattcaaattcttgatctggacgatcatacagcttatttaattgttcttgatccaaggattcaatagttttatcaacccatgccttcttagtttcaggttcaattctgcggtttaagctattaatcaaagcttcttttgtagcttcaattctattccttaagtggtagttttcattaaagccgtagtaaatttccttgatcttttccttatcaaaaaatggtttttccttactcttaaagtaaatgttcttaaaaaccaaaccattcttttcaagatgtttagcatagcgagttactgcattaaagaattgcaatgaattcttcaagttaacaatcttatcgttttgctcattatcttcgaattgttcaaataagttttcaacgttcattccgggaacacggcgagaaacaaactgccagtaagtcatttgaaccatattctgttctcccatttccggaagaacatttttaacataatcattaaataattgatttgggctgaacataataacatcgctagaagtcaaattaccacggtagcgatatagtaagtaggccacacgctgcataatggcagatgtcttacccgaaccagcagctccttgaacaaataaaagatcagcactagtatttctaataattttattttgctcacgttgaatggtagtcacaattgacttcatctgtgtagatgatttttcattcaagacatttaagagcatttgatccccaatggattcattggtatcaaacatattagtaatcttgccatctttaattaaaaattgacgcttcttagtcatatcaacagtttgcacaccatctggtgcattatatgatacttttcctaattttccatcatagtaaatagatgatattggggcacgccaatcatagattaaaaaatgatcttctttatctgcaaaagaccctaatccaatataaatagtttctggttcttcattaggttcttgaaaatcaactcttgcaaaatatggcttcttttctaaacgctgcaaggtcgataattgcttagctgaatgttgccaggcattttgtcgttccgctaacatttgttgttgctggtgaatagacagtgcagtatccattgaagtggagtagccatcgtaatctaatttcacatcatcaaaaaaatgtgagttgatattttgagcttcattttgtgcatgttcgattgaatgatcaagctctttttctttcttcttaattaagccaagaacatcatctagatgcttttgctctttttgttgttcagtttcttttaccaaaattacgtcacctatttctagtattagtaaaaacgttgcatattattttatcatatgtatacgctttctaaaagaatttataattttcagaaagtctcaactgttatttagtcttttcttaaataattagttttataattaaataaaattacattgcgagatgagaaagtgaaacgattttttaaaacaattctagttctagccctcctttttgtggggcttgagttcgcctatcaaaaagctgctccagaaattgaaaaaacatttggaactagaaatcccctcccatatctaactgcaaaagtacaacaatttatttcacctgaaaaaatccaaaatgatgataaggatggagataattctaaaggacatacttttgactctaatacagccactgtctacatcgatctttctgatccaacgctaaaacaagctgcgcttgatggaattaacgtttggaataacacaggtgcctttaattttaaaatcacaaatgatagaaataacgccaaaattattattaagtcaatgaatgacggtgaaacaaatgcagccggactaaccgatactcaatacaactcattaactgggcatttacttaaggctacggttcgcttaaattcatattatcttttaaatccaagctacggctacaataatggccggattgtgaatacagttgaacatgaattagggcatgcaataggattaggtcataaagacgggatttcagttatgtatccacaaggatctttctacacaattcaaccaagtgatgtccaagatgttaaaaaattataccaagagcaataagagcgactctcaacacagagtcgctcttatttcatgtttttcttttttaattgactttgctttttaaaatatggaatccaaaaggttatcacatagccaactgcaattccaacaaaagtccaaaccataatatttttgacaaataagccaataaacagaccaattaagccaaaaattccaataataaatgattgatcaagttgcttcatgttccttccctcatttctctcttaactatagcaaaggtatattattataagcatatttttagacttaaatcactagttattttacactatattgcataaatataattagctttgagttcataaacaacaatatttatcaaagctatacaaatcattattttttaatattaagaaaggaatggtatatcctttatggatagtcagaaacaacctcccgcgtattctcaaacaaaagatgagttattttcaaatctagaaacaagctcagctggtttaagcgagccagaagttgacagacggttaaaaaaatatggacataatgttttaaatgaaaagccccctaagtcaattttaaacatgctcaaagagcaaatctttgatccaatgattttaattttattaggagcagccagtttttcagccctcttaaatgaatgggtagaagctggtgtaattttcttcattgtgataatcaactctattattggtattatccaagaaaagaaagcccaagcttctcttgccgctctaaaaacaatgagtgctccaactgcaacagtaattagaaatggatctgaaaaaattgtttcagctagtgaattagtagtcggcgacctagttatcttaaccaacggtgatatgatgcctgcggatttacgcctaactcaatccaataacttgaaaattgctgaagcttctttaaccggagagtcaattgccagtgaaaagaatgcagctgctgttctttctcctgattgtcccttaggcgatagaaaaaatatggcctatacttcttcaattgttacttatggtcgaggaagtggaattgtaactaaaactgggatgaatacagaaattggtcaaattgctggaatgctagaagacgatgatactagtgatactccactgaagcggaaacttaacgctgtgggtaaaattctaacaattattggtttaatcatttgtgttttaatttttgccatcggcgctttttatggacgtcctcttctaccacaatttttagtagcaatttctttagctatttcaattattccagaaggacttccagcaactgcaaccatcattatggcacttggagtacagcgaatggctaaggaacatgccttaatcaaaaatctaccagcagttgaaacacttggaaacgcaacagttatttgttctgacaaaacaggaactctaacgttaaacaaaatgacagtaactcatttagctaacggagatgatttccttaacaaaaagatcttaaaggctcaaaaagcagtaaaaaacaataatgcttataaagacttaatgtatgctgctagtctttgtaatgatgcttctcttagtcctgctagtcccgatgaaattattggtgaccctacagaagggggccttaattccactagcacaagattttggatattctgtttccagcttaagaaaagaatatccaagacttggcgagtatccttttgattcaattagaaaacgtatgtctacaattcatgaaataaacaatgaatatgttgcctacactaaaggagcactggacgaattactaccactctgtgactacattgctacaagcaatggaatgcagaaattaactaagactgataaagaaaacattttagccttgtcatataagatgtctgaccaagccctgagagttttaggttttgccagccgaaccattttgaatttaccgcaagaaaatgaaaatattgaacaacatttagttttcttaggagctgttgggatgattgacccagctagggatgaagttaaagcatcaatcaaaatggctcgcgaagcaggcattaaaactattatgattactggtgaccataaaaatactgcggttgctattgctaaaaacttaggcatttatgctaatggaaatactgttatttctggtactgaactaaacgagatggcagatagcgaattagatcaagcagttaagtcaaccacagtttttgctcgtgtttcacctaatgataagttaagaattattcaaagcctaaagcgaaatgaagaagtagtagctatgacaggtgacggagttaatgattctcccgctttaaaagcagctgatatcggagttgcgatgggaattagtggtactgacgttgctaaagatgtctcagacatgattttacttaacgatagttttacaactattactgccgccattaaagagggacgaaaggtttaccgcaatattcagaaagtaattcaatttttactagtcggtaatattgcagaaattactactttatttattgctaccctctttaattgggatgcaccactacttgctgttcatattctttgggtcaatttagctaccgccagcttaccggctctagctttaggagtagatcctgcaagtaaaaatattatgaaacataaaccagtgaagactggaaccttatttgaaagagatctagtctggcgcgttatcagccaaggaatctttgttgccttaatgacactattagcttactggattggagacacttttgataatccgattgctggtcaaacaatggccttctgtgttctagctttatctcaaatgttccgcgcatttaatcaacattctaatactgatccgatttggattagaggaaacaaaattaatatttggttaattgtatcctttatcgtttcagcagttttaatgggagttattctctttactcctaacttacaatctctctttcatttgactaacctgacatcaagacaatggctagtagtcatcattctttctctattctcaatcttacaagttgaattaatgaagctaatcaagcgatctgttaaagctcgtcaacaaagccgagcattagaatcagtcacagattagcacattatattaatagaactttagcaagcatatttttagacttaatagcaaataccttgtacaatgaaaatataaatttaacacttacataagcataaagacataattaactttatgctttctacttttctgtaatcaaataactaacacattttaaatataaaaaacagccaaattactctatcttgagtagtttggctgtttttattgtcagattatgctaaatagattttttcataactgctgcaagtgcctgctccttaattttatctacatcaactttattaagcttttcatattctcgcgctaaaacatcgcataaatataattgtgatacctgaccagctacggtaccaatattcataaattcactaactgacgtctgcaagcttacatcccctaattgagcaatcggtgacgtaagatcgttagtaatagcaataattttagcgccgtattctttagcaactttgagtgaatcataagtgtctttagtatgaccagagagtgataagccaactactaggtcatctttacttaataaggtcgcaacttgaacttgaatatgcggatcagactccgcattggcaatcaaaccaattctaagccaggttctttcatagtctctagctgattcacctgagtgtcctaaaccaaaaatatgaattcgacgcgctttagctaataaactaactgcttgttttaaaacagaaggattgatcaattcttctgttttttcaattgaagaaattaaaactttactacttaactctgaagatgtttgagcttcgtcatgaccttttgaggtagtcatcattgaatcttgtgccaaagctatttttagatccgagaaaccggaatagcctaatttcttacaaagcctaacaattgtggcatctccagtgttagttgcagttccgagcgacttaattgtgtcataaattacatgttcagtatgactcgcaatatagttagccaatttattttctgacttagttagcttgtctttattttgattgtatcgctgtataaattccattgtctcacatcctgattataactatatcatgcttttataagaaaacgcttgcacaaaaataaaattcattatattatttctttgggaggaaaactccaaaataatatttatttggagtatatttacaaatgaataaagaagaatttattaacaaaatccatggtggcttaattatttcatgtcaagctttgccaggcgaaccactctatacagaagaaggcggaattatgcccctaatggctaaagcggctcaagaagcaggcgcaacaggcttaagagcaaattccgttagagacattaaacaaattaaaaaaattgttgatcttccaatgattggaattatcaaacgggactatccaccagaaaagccctatattactccaactatgaaagaagtagatgaattagttgaaactggcgtagaagtaattgcaattgatgcaactttgcgtccaagacatgatggtaagacagtaaatgaattcattaaagaaataaaaactaagtatccaaatcaacttttaatggctgacacttcaaattttgaggaagcaaaaaatgcttatgaggcaggcgttgattttgttggtactacgctttctggctacactgaagaaagtcctaaaactgatcacccagactttgatttaattaaagctctagttgatgcaggtcttccagtaattgctgaagggaaaatccatactccagaacaattaaagcaagttattgacatcaacccagcaggaattgtagtcggaggagcaatcactcgcccattacaaattgctaaaacttttacttcagttttcgaaaattaaccgagcgtaacgaaacgaggcgtaatcatgtctaagaaattttctcatattggccaagccttctcacaactggggcaagcctttatgcttccaatagctattttacctgtagccggcttactcctaggactaggcggagccttaaccaataaagctgccgttacctcttatccttggcttaatcaagaatggcttcaaacaattctaaagataatgaattttgcaggaagtgctgtctttaataacttagctcttattttctcaattggtttagcagttggcttagcaaaaggggataaaggaacagctggcttagcaggtggcgttgcctatctagtatatacagccacaatctcaggactactccaactattttcacctaaaaacactattgatacaggagtattaggtgcaattgtgattggctcagttgttgcctacctacataatcattatcgcaaggtagaattaccacaattcttaggcttttttggtggttcaagatttattcctattatttcatctttagctgcgattgttattggtgctatcttcttcattatttggccaccaattcaaagcgatttaaccagtgcaggttatgcaatagctaaaatgggaagtttgggaagttttctatatggcttcttgcttcgtttaactggagcagttggtctacatcacacaatttatccaatgttttggtatacagctttaggtggcaccgcagatgtagctggtaaaactgttgttggtgctcaaaatattttctttgctcaattagctgatcctaatcaccatggtttgtttacttacggtactagattttttgctggtcgttttgcaactatgatgttcggtcttccaggagctgctttagcaatgtacctttgcttacctaagagaaatcgtaagactaacggtggtctatatctttcaggcggtttaacctcattcctaactggtattactgaaccaattgaatatactttcttattcgtagcaccttggttatatgttatccatgcttttctcgatggatgttcattttatgttgctgatatcatgaatattagaattggaaattcattctctggcggtttaattgactatcttctctttggtgtcttacaaggaaaagataaaactaattggccgaatgtcttaattatgggagttatctggttcttcctttacttctttatttttactttttgtattaaaaaattccatgttggtattccagggatggttgtagaagaaaatcaagatgctgaaaaaattatgtcaaacagccctaagactgatgacaaactatacaacgaatcttgtgagattatcactgctcttggcggtttagaaaatattgaaactgtttcagcttgtgcaaccagattgagagtttctttaaaggataatagtttagttaatgatgacgtatttaaaatgttgggcgctcctggagtattaaaagttgctggtggagttcaagctatttttggtggaaaggccgatctatatagtcaagaaattaatgacattatcgcacatccagatatgcagcccgcaaataatccacaagtggataaaacttctaattttcaatcaaattctgtgcataagtcagaagaagttattttcaaggcacctgtcaaagggacttttgaagatatatctcaagttaatgacgaagtattttctcaaaagatgatgggtgaaggatttgcaattaaaccagaaaatggaaaaatttatagtccggttaacgctacagttgtatcaatctttaaaacaaaacatgctgtaggtcttaaaaccgactctggtttagaagttatgcttcatcttggaatagacactgttgaactagaaggtaagccatttaccttaaaggtaaacgaaggcgagcaagtaactccagagacacagttaattgaaatggatctaaaacaaattgaaactgctaaaaaagatccaacagttatgactctgattactaatagtagtgagagagttgaacaagtcgaagatatcgcgacaagtggacaattagttgaggcacataatgatgtctactccgtaaccactaaataactttaatctctctataaacaaaaaatgtactcaagttttcattttcttgagtacattttttatgttcttttattttatctagtagtaatgtctacatccaattcaattggacagtgatctgatcccataatgttacttaaaatcttagcattagttaatctatcttccaaattattcgatactaggaagtaatctagtctccagccaagattttctgcccgagcttccttatcacgatagctccaataagtatacttagcttcatctgggtggaagtaacggaaagtatcaataaaaccagcatttaacaattcagaaaattcttttctttcaataccagtaaatcctggacggtggtggttatcatctggttcagctaaatcgattctctcatgagcaacactcatatctccgccaataattactggcttgtattgcattaatttagtaacgtaatttctaaaagtctgtgcccataattctctgaagtctaatctttgaagcttttctcctgaaaatggtacttgaacattaataaagtaaaagtttgaaaactctaaagtaatgcttcttccttcaccatcaacttctggaacaccgaagccattagccacagtaattggtttttcttttgtaaatactgcagtgccggcatagccttttctttcagcataattccaatattgataatatcctggtaaatcaatttttacttcatttggctcaacacgagtatcttgtattccaaaaatatctgcatctaaatcagtaaacgtgttaacaaagccatgacgtaaagcagcccgtaaaccatttacattccaagacataaatttcataataattcttctttccatcacaaaataataggtcttatcaactcaattgtacaaacttaatccccatagatgaaatatttcgacctaaaaaatcggattaactatttaagctaatccgatctcttcttatcttgtctttaaatgccaaacaaagaatccaattccaattactaatgctaaaattccggtccaaattaaaccagcataaaagccgccaataattcctagaattccagcaacaatcatcatcgctaagccagcaatatcaccgcctagcccatcactattttcagttgaaacataaacaataccgctagccataaacagaccgcaaaggagaactccaataattcctgctaccatgtttttctcagcaattatccccaagaatccacctagtagtccctgaataaatagccaaactgaatagacaatcattaaaattccaattactaattttgtaactctcataaaaacccctcttctttcacctattaagttaatatacttaggccgaatattcaaaatttttgatacaatacttctatgctataaatgaaagacacaaaacataatgaaaatatttgagtttattggattaagtatttatttagtattaattatcattttaatagttcgtcaagttaatgtaagtcgtaattttagaaataataaaattgatgaagaaacccatcagaaattaactaaaagaaacacaattttattagttatagtaggtattctactgattttatttttatatacaccgtttaaaattttgattttttagatttgttataatgtaaattagtgttattcaaggagtttacaaatgaagagaatttatattgttcgtcatggtcaaacttatattaaccgctacgataaaatgcagggttggtgtgacacacccctaaccgatgaaggaatccaaggtgcaaaagatgcaggtaaagcgttgagtgaagttccttttgatattgctatctcaagtgacttaaaaagagctagtgatacttgcgattatattattaatgaaaattgtaaccgagatgagttgcaacacattgcaacaccattttttagagaacaattctatggcttctttgaagggatgaattcagacgaagcatggcgtatgatcggtggacctcacggttatccaagacgagatgaactacttaaagaagtggatatcaacacgattaaggactacatgaaagaagcagatccatatcatgaagctgaaaatgcggaagaatattggaatcgcgtcgataaaggttttgacttaattagtcaattagatggtgctgaaaatattcttcttgttacccatggctttacaatcagaagtattgtttctcgtttcgctcctggagaatataatttagcccatggtccaagaaatgcgtcaattacaattatgaatatgactgacaaggatatgaagattacttcctataataaaatgtcagtatagaaaaaaggcttatcattttgataagccttttttcttaatcttctttttgtaaaacaatatgttgatataaaactaccgttaataagtaataaagtacgtaaagaactccgaaaatagtaaatggaatccaaagtttgtcgtaagtgttcatccctaaaatagacttgaataattgaagtccaaataaaacgtcaactactcctaaggcagcaggtaaagcaaataaaattccaatttcttttgcaatagatgcttttaagaggctctttcttgttccaaccttccaaagcatttggtatcttggtttatcgctgtttgctccagataaaactttgaacattaatgttgaagcaagcattgctaaaaatgctaaccctaagaagaagcccataaattcaaaaccagaggtcatacttgaaactaagcgatattgtgctgatttagaattggagagatttacattaactgcgtctttatcaacttctggtgaactcatcatttgagttgcggataagttttggagtttctcaatattattaaagttacttctaaaattgttaactcttaaaagctcaattctatttactttagccttaacttgattatattgagtttctggcacaactttagcttgagcatcaatatatggagttaaagatactaactgatattgtgcttcattagtatcagtcttattcttaaaatcacttgctttaatacgtctagtatcataatgattcatatcgttttttcttgaataatgttgatacatgatctgattattcttgatttgattttctggaatataaagtactctcgctttttcttttcctttaccttctaccaccatcttatagtcaaacgttgtagtagattttacagaaactttctttaattgattatctacctttttattatgaccatacagaactacatcataataggtactttgcattgactgttcagtcatattattaaagttcaatccaacagtaattgctcctaaagcaagagcaaacaataatgatacagtagataaaattcgagtataatcgctcaatctaaacttaagttgtcctaaagtgaaggaatgtaacttcttatatttgtaagctaagttcttacgaagtaaatcaataatggctgtaaagaaggaatcaaaagtaaagtaagaaccaaaaacaattgtaaagaaagctattggaatagtttttgttcctaattttgctgcatgcatcattgcccagtaaccaacagcaagtaacgcaattcctaaaattgcttcaataaatttccataatttatttctatgtaatttaaccggtttttgatcttcatgaagtaagttaatcacgtttgacttaactaatttatgacgattccaaaaagctgctaagaaaaacagaattgcaaagaaagctattgtccaaagtaaggctggtaagtaaaaaccaacaaatttatgaatttgcaatcctagctgagaaatcaacacactggaaactccctgtgttaatccaacccctaagactgtacccaataaggtagctagcaagccaacaacaagagtttcggtaaagattaatcttccaattttacttgttctagctcctagcatcatatacatcccatagtctttttgtctcatactaagcaaaaaactattggcatatacaatatagacaaaagtaataatagaaagtaatgcaattccaaaaccaaaaacaatttgggtaattttaaaagcaatgcttagtgaaccatttaagaaagctgggtttgtagctagagtcatgaacatataaaagatcgcactagcaaaagttaagcctgaaaaaaggactaaatagtctttgaaccggcttttaatcccggttaatgataatttccaaagcataattatttcctttctattcttaacgtctacctaattctgcaataatttcttgataaaattcttctctacttttaccatcttttttaatttcttttccgatcttaccatctttaatgaaaagaattcgactagcatatgaagcggaatatggatcgtgagtaaccattaaaatagaaactctatcattttcatttagacctttcattgtttcaagtaattcagtagcactctttgaatcaagtgccccagttggttcatctccataaagaatagctggttcatgaactaatgcacgcgctgctgcaacacgttgtttttgtccaccagagatttctgctggatatttatttaaaatatgatcaattcctagtcgcttagcaattttatccactttaggattaatctgactactcttcacattttgaagtgaaagaggaagagcaatattttcacgatttgttaggttttctaataagttgaaatcttgaaaaataaaaccaatttcttgaccacgaaagtctgccatttgatttttatttaagccagtaatgtcacggccattaatgtatacatttccagttgtaggttgatctaatgtagataaaatatttaacaaagtggttttaccagaaccagatgcacccatgattccaacaaattcaccacgttccacatcaaagctgacgccctttaaagcttggtattgtttttcaccttttttaccataagtcttagtaatattttgaacttgaactactttactcattttggctcctcttttcgttatagtgtattacgtacctgttacactatataatacagacaccgtgtaaaaaagtaaagcttgtttttcaattttttcatcttttcttcttgtataatagaaaccgtaattataaataaaatatgaaatgaggtatagaatgcagggaagccacttcttcaacccacctcctaaatttatgtaaatgataatagtataggatttttaggaggaaaatatttttggatacttttgatgaggcacaaaaacgtaaaaaactaacttggcccgtgattgccttaatggactttgttacagttattggttttgatgacattatctataactttcaaaatcaaggattagctgtagttagtgactggatcttactgttaattctatttgtagttccatacgaattaatcgttggacaactaggagctactttttcagatgatggtggaggcttatcttcttggctaagacacacctctggggatcgaatgggctatattactgcttggtgttactgggtagtttcattaccttacttagttgatgtagctaattcgacagttgtttcttttgcatggctttttaagggacatgcattaagtgacaaggaaatgagtaattgggcttttgctttatttacggcaattatttttgtcatctttatctttttccaacaccgctttgctaattcattgcaatggctatccattatcggtggcggtgcaatgtttatcatgacaattcttttcgtaatcatgactattgtctaccttggcgaagggcgcacaattgctacgcagccattccactttaagaacttcttgccaacgtttgatatgaaattcttaatgtcattaggtttattgatttttgccatgaatggagctgaatttgttgctccttacgttactgaaatgaaagatggccctaagaatttccctaaagcaatgtacatgctagcaatcatgactggatttttaactatttttggttcctttgcattgggcgtattctttaatgcacatcacttaccagatgacttaaaaatgaatggttcctactatgcttttcaagcaatgggagaaaaattcggaatgggtaaattcttcttatatactttcattattacccaagctctctacatgcttgcccaactagctgttttagtagatggcggagctagaattttcctatcagacactgctaaaaaatatctacccaagcaattaactaagactgataaaaatggtctaccaattaatggttactggctaacaactggaatttgctcagttttactatttttaagtgctactcttccttcagttaatgacattttcaatcaattacttaatttaaacggaattgtatcaccatatgttaccggtctactcttctgggcctttattaagatcagacttcacccagaaaaattcccatcacaatatgtatttatcaagaacaaaaccttcgctgttattgttggttggtggtgtttaatcattacagttaccggcgcaacttttggaatcgttccaattgatgcaaaagctggctcagctacttggtggcatatgttaatcctaaacattgtcgaacctcttttaatgattggattaggaattgttttaccattaattgctaagtggcaaagatcaaaggaaaattaatctataacataaaaatgctattgactctcggtatatgtacttgagccaatagcattttttatttattgcaattaattatcgttcttgccttctagagaaaaatatcttagtacttaataaacaaactagataccaaactaaaattttgattaataaaattaacatatcttgattaaaaaaactatttgcctctatccaatctattaaattactaattggaagtagttctgcaaaaaattttaaccaagtaggatattcactcactggaataatcattccagctaaaataatcaaactacccgttacaatattagaaagccagtaaggattctcttttttcattccccatacagcacaaaaataggctaagagaacacttataaagatttcaaatggtaaagccagaaaaagtctaggtataatatttattttattaagtactagcaggcctattactcccaaaagaacggtttctaaagaaagtacgaccgccgcaattacaaattttactagccaatagtttttaaaagtaggtctaattgaaaaaatatcgtccagtaaattgatattttgatcataaactgtggatgctaccacaatgccaatacctgtagaaatacctgtagtaatcacgcttccgaccaaaatccgagaataatcttgactcgctccaaaggcaatcaacaaaaacataattagagatactaagggtaacagtaaataattaactaaaatcacgttaacaccgtcaaaagttccaatcgaacgtagagtaacacgataggcagctttcaaaatatgctcaatctcccctctttaaaagatcgtttaattacaatattagtcattaatttagataaaactccaaagaccactacaactaaaatgtagctcattatccaattccattgaatagattcatgatagataatcctaattggtaaagttaacggacttagcatttgaaaagatttgatacttgttctaattgcgtctggaatacttaaaagtccggataaaagtaaaattggtaataataaaagctgttcataaacaattgcattcttgcttaaaacgaaaaataaactaataaaatagcttaaaactgcagctgcaatccataataagatgattcctactaataattgaaaatctaagtaattaactggcatttttaataaccaagcttctaatcctgctaaaggaaaagcaattaaaccatacacagaagctggaatcagagtagccagtaaaactttttctctagctaccccagtatttaatagatacggtagcgtcccttgaaatctctgaaaacctaatgcaccagcactagtagtacatgatgcccatgttcccattactcccgcaattaaccattctttaccgtcataagtttgcaaaacatagtgagccaaatattcataaagtagcattgtagttgtttcaataatcactaaatttacaaaataagtattttttatgtataagcgtacttgaaataatgctaatttaataaaagacatattacacctgccttctttttaactgatcagctaccgctaaataggcatcagctaaacttgcatcattttccacaccagcaaatttctttacctcttgaattgacccttcaaaatgaatcatcccaccgccgattaaaaagatcctatcagccaagctttcaatatctgacatgttgtgactagttaaaataatacctcgtttttctgacgctattcttttaactaattgtctaatcgaaataactgattcaatatctaagcctgctgttggttcgtctaacattaatattttgggatgatttactaatccacgagcaatatgaagtcgctgcagcatgcctttagaataggcagatactttcttttcagctacatcgactaaattaacagtcttcaaagcttcttgaacaccgcttttaatatttctttctttaacacctacgactcgagcaaaaaattctaaattttctctcgcagtagcaccgtagtaaaatccacgatcaccaccaaaaacaatgcccatcttcttcctagcttttcgtgggtacttaatcagatcaacaccttctacttcaacttgtcctgaagtaggaactaagtaattagaaatagatttaatgagtgttgttttgccagctccatttggtccaacaaaagaaattacttctcctgcatgtaattcaaaactaatattttttattgcatgaaataattttttcttatctttataatcacgtgtaatgttgtcagctttaaatatagtatttgtcataattttctaaaattcctattggattaaatttcaaattctttatatcttttgttactacttttactaacatatagcattacctctttttgattttttataagcatatcatcgtataaattaatattcaataaaaatttaattatttttttatttattttgttacatcgataaattgttatactttaataatataacaatgtgtgaaagccttttatttgctattctgatattaaggtcttatatttataaatgaaggcagtcttcatagagaagtaataaataacatatatttattgctattactttatataaatatttagtaattatatcaagaagaagtttttgacattctgaatcataataatcattcactattttcactactttttcccatctatagttcaataaaattaaaaatagtgaaagttattgttagtaaaaatacagtttaactaaattcttcaggaagctgaaatatattttagtgtatagcttcagtttaaactatgtattacaaagataataaatttgtcaccctatatacccttaagtcgtgagctttcctattcccccataattgtatggcttaagtgattttcttaattaactacctttgatacagttagtttaatttcatttacaagtataaaatttattatgatttcaggataacaactatatactccactcatatttatgtgcacggttaattaaagtaattatctctattcggatattaccgtgttcaaatatcctaaaggtcacttcgtttttcggagtggccttttttgtgtcaaaattgatttttatttaaaaagaaattataattttcatactatcaaataaaggaatggttatgatgattttttaagttattaactccacgtagaaatactattttttgaaagcaggtgaattatttgatcgacaatcaaccaaaaaaaattaaagcatttattgcgggcgtaaatttaaatgatcctaattttgactattatatgactgagctaagagaattagcacttgccaacaacctagatgttgttggtcaagcaagccaaaaggctgagaatatcgttgcgggaacatattttggcgttggtaaacttaatcaaattaaaaacatggctcgagaattacatgctaaaaccttagtaattaatgatgaactttcgccaactcaaattagaaatattgagagtatgacaaaacttaacgtgcttgatcgaactgaattaattttagagattttctctaatcgtgcatgtagtagacaagctaaactacaagttcaacttgctagattacaatatgaactgcctcggcttcatccatcagaaaacaatctagaccaacagcgtggttctggtggtgcaagtggtgggtttgctaaccgtggttctggtgaaactaaacttgaattaaatagacgaactattggtaaacaaattagtgcaattaaaaaagaactaaaagatattagcaaacaggaagaaataaagtctgctagacgaaacaattcccgtctgccacaagttgccctcgttggctatactaatgctggaaaatcaacaacgatgaatgagttgttgaatgtctttagtgaggaagcttctaaaaagcaagtatttgaaaaaaatatgctatttgcgactttagatactagtgttagaagaattgacttaaaagatgacttaagttttatcctttcagataccgttggttttatctccaagttacctcataacttaattgaatcatttaaagctactttgcaagaagctaaagatgctgacttgataatcaatgtcgtagatgcttccgaccataatatggttcaaatgattaaaacgacgcaaaaagttctagatgagttgaaaattaccaatgtaccaatgattaccgcttataataaagctgacttaacagatcgcaattatccacaaattgagggaaatgatattttatattcagctaaagatcccgaatcaattaagcaactagctgatttaattgttaaaaaagtttttgataattacgaaaaggtaaacttagtcttacctttatcagacggtaaaaatttagcctatcttcatgaatatggtcaaattttaaatgaagatttcaaagatgatggcgttcatgttacagtaagactatcaccaaaagatctagaaaaatttaaaattaagaccgtttaacaaacaaaaaagcgtagattttaaaatctacgcctttttcatattatttataaataattacagcttcgtttttctctacattatcccaaactttgggagcatcacttggtcttaagttaacacatccataagaaccatcatttagataagctgtttttgaccaattctttcgccaactattatcatggaagccgcaaccggttaatgtaaatggcatccagtatttcacatcaactgagtatttcgaaccatcatcatttgttccctttaaaacacttggagattctttatagtgaatataccaaactccagtaggtgtttctaggttcttacgagcaatcttagtttccactgtacctgtaacaattgtgtctaatgttagcacacatttaccgttcttgtagacccacagcttttgatcagttaaagaaacaacaacataattattaccaattccattattgcttaaaccataaccagttccataggtactaaaaccttcaccatagatatagttttttccattaaggttttgaacgttattggctaatgcatcctcaacacccgctaataatttcttttcattaattgcccatccatagctttcattcttaaccttcgtaacttgaccattcggaagcttgaagtcataagatttatgaagagtagatacttctttgttaatgttgttaattttatcttctagaatttttgtatctaaaaatacgtacttattatttctatatgatacatttggaaatacttctgcccttttaaatacaaaagacttgccatttacagtatattttacttgccgatctttaatctgatttaatttatcctttgcctttaataaagcatcattttgaaaattccatttctttcggctagggtagcgagtatattgagtttcaaaatatgattgaacttttttactcgtaattactttattaccggtcttctttaatacgactttatctccctctaaaatcgcatcattttttgccttttcatttatttttgcagtagctcttttgaccgttagctttccaacaggaatatcataaattacaacattcgaattaaagtgggtagaattaaatttttctgcttcagcatttcttttagactgaatatgaccaaaaattaaccaacctattaaaattattattaagccaattaaaatacctattagccacttacgatagttatttgtgggatgggtatttttttcttcgtttttattattcattaaaaatacctatttccttaaaaaagttcttttaattatatcataaaaaagaaggttaatcttctgattaaccttctaaaataactatctttatttcaattaattagtttacacggattgcgtaatctggcatgaagtaacttgagatagaagcttgagttacgttttgacctggttgtggtgcgtgtacgtattggttgttacctacgtaaatagcatcgtggtagtcaccccacattaagatatcaccagcttgtgcttggctaacagaaatgtgttgacctgcaccagcttgttggtaagtagtacgtccaacgttcttaccagcttggctgtatgcgtattgaactaaaccagagcagtcgtatgcgttaggaccagttgcaccccatacgtaaggcttaccaatttgtgattgtgctgcgctaactacagtttgtgcagtactgctgtttgattgagttgaagcttgtggcttagcagtttgagtagttgctgcttgacttgaagcttgttgagttggttgagcttgttgttgtgcaggcttagcagcagtgttgttttgtgcaggtgcagtgtaagtagtgtttgattgagttgaagcttgtggcttagcagtttgagtagttgctgcttgacttgaagcttgttgagttggttgagcttgttgttgtgcaggcttagcaacagtgttgttttgtgcaggtgcagtgtaagtagtgtttgattgagttgaagcagtagatacttgcttagtagttgctgcagtattagtttgtacaggtgtagtagttgcaacagatgcagtgttaactgaagcagtagttgctgcttgttgtgcgttgttaacgtttgctgctggagcttgtgcagcattattgtttgcaacgttagctgcaggaacttgacttacagtagtagcaactgcagataagtcagcagtaactgcgattggagcttcttcttcaacgttgtcagatgaaatccattgatttccacctaagttgtaccaagtttcacctttaacagtcttaactttcttgtatgtcttccagcttgattggtgtggtaagtacttaccagtttgttgcttaccatcttcgtagctgttccaaacagcaacactttcaccagtcttagagtttacctttacaacaccaatttcttttgcaggtgcttgaagagtagaagcttgagcagtaccgttaaaagataatgagtttaatttagctgcacttaaagttgcaatacctgcaacagcgaatgaagcagcggttgtaaatttgattactttagatttgatagtcaagggttattcctccataaaattcattttcttaattatcaacatagccgtcattaattaactaaaaagttatgctatgtgtttctttttttaattgacaatggttattgtagggtataaatattacagccctgttacaaagctaaatcattgtcattacatttagcttattatcaacctttttcatattcaaaatctatttattttctagcttttttacgatcttatctagttctttagctgtcttttcccagttgtcattatttaatacatgtgctttttcagcaagttcatctgacaaatgtaaatcacgcttaaattcaaaactatttaatcttttatcaatttcactagctttatccccgcgtcctaataatcgcttttttagaactgaaaaatctgaaacagttaaataaataaaatatgcttgcttccctaatttttctaaataggacttaactccatcagtctcaacaattaaagaaaccaagtcattctttgcccaggctttttctaaagcttctttgcttgagccatattgatattccccatattttacatgttcaaagaaatgaagttttttaaaactctcatcagtttcaaaataatatgactttccaggaatttctccttgtctaattggcctagtagtatgtgttactacacgcggaatattatatttttccgttaagtattttgagactgttgtctttcctactccacttggtcccgcaattatgataattctttgcaaaatattactctcccgcttgaaatcgactattatatataatagtatttcactattgtaaaacatttctgtacagaaaagggagttttttaaatgaaaaaagctgatgtaaaaattggtcaaattttagctgctacttctgaggaagaacttaagcatccttttcaaggaaaagtagaaaaaatttatgaaaattctgctttactagctattacttcatatgacccagaagatgaatcttcagttaatgaattaaacaataaaatggtcattaacttcaagagcttgaagaaggtaaaatcacctgcccgtggaaagactgccgcaacaaacgatgtaaagatttctaaagttgaacctgataaaaaggataaagaatcaaaataaaattaagcctaaataattttttgttttatcaaaggaacctaaaatcacatgaaaaaacggcttcaaacattcttattttggtttattttaattcagccatttttagatatttattggttatctaggccaccacttctaaaattttcaatacctactattttgagagtcttaggagtttttattgctattattttattctttagtatcaaaaataattggcaaagattcagaaaacaatggtggattatagcttatattggagttttaatcttatactcaatctgtcacctaatttcggtaaaaaattttactggtgtggacgcaacaggcttccattattcagctaaagttgaaattttttatctagtgagagcttgtctacccctgattgttatctatatcacttcatatagcgaatttcaggctaaatacttcttccgagtaatccagggtatttcaggcatatattcattaacaatcgttatctcgaatctatttcttttctcattaacttcataccatactactgaagctaaaagaattagtgctaatattttttcttggtttactcaaacaaattatccttttaatgccttagcttctaaaggagttttctttcaagctaatactttatcagctattttgttcatgatcatgcctattatgctctatattctttataaagagtttaatgttttaaatatagttctagtgagttctcaagcattagcaatgttaatgcttggaacaaaagttggaaatttcggactgattattagcttagtggtatttgtattagtcttcttaatccatagtttgattttgaagaatactagattttcagccaaattcttaattacattaatttgtatactaactgcttcggctgctatttttccttatagtccaactctcagaagatcttcacttgaaagtggtgtagctcaaaagagaagtaatcttggcgacaaaaagaggcttgatcaagaacttaatgctggattggaaagatataaaggcaaaaaacaagaagactatcttaaagaatttatcaagaaaaattactgggtatattctttaaaacatgatctagtattggagcattacacttatcaaaatgatccatactactggcttgaagtgatgaaaagaccagcaaatgaacgcctaaattatcgacatctagaaaaagatatcttaaaccgcgtcatgaaaactgataaaaacaaatcaaataaattgtttggtatttcttttagccgtgaaaataatattgccccactagagcgagactttttagcacaatattattcaatgggaatattaggagtcatcctcttagacgttatttacttatttgttctaggctatggcatcttttattggctgttcaataaaaaagtaagatcctttttaaactcttcgctattactatcagaaggatttatcttgtttgctgctttttatgcaggtaatgtacttgaatacttatcagcaactttagtaatggcatttatcttaggatttttattgcaaaatattcgctatagtcgttattcagaaatatcttccaaataactaaacaaaaggccttatttcgaattgtattcatcgaaataaggcctttttattgctaaattatctttattattttaattctcttacaaaagtacggtcaggtactctaattaagtagtacctagctgctgtcttaccggcatgcattcttaaaccattctgccagtttttcttataggtagccgtataagtagccacataagcattttggtagcgtgcatctgcttggactaattgcttagatgaataaggaatagctcccgcttgaacagacattggattttttccgtcagaaattgtagcataattactcgtaacagttactctgtttccgttactataaaaagtatatgtctgaattggagtctttttattgtcagatttagcggtgacatagtatgagcgtttattgcccgctgttaaaattaatggttgatattcaattttactagataaaacctgtttattttctaaatcaggattgtaaaataaagtgatgctaaacatatagatcgcaccgcataaaagaagtaaaacttctaaaatatctaacaaggtagttttccactcaaagcgtttacgatctttaacaatcattattaagtgacgttttcgaatattttgtacaataaaaattaaatataaaaccaggattaaccaggccaaaatacctaaaatattccatccaagtgtcataaggaacctccattttctttaagttaagtatacggtacttattgccgtttttaaaactttttttgatttgactttaactttaaaaatcgcgacaattgaatatgtagaaggtagttttggtatataacgataggcaaaactatggtaaaaatagctttttatacaattacaggacaaacgcaacggttcatagataaaacggggcttgatgcacatcgaattgaggatgctcatcctcaatatcaaatgaatgataaatacattttgattttaccttcatatcaagattttatgatggattccgttgttgattttttaacatataaagataataaaaaaaatcttttaggattaattggatgtggtaatcgtaactttaacgatctttttggccaaacagcaaaaaagatctctgttacattacatgtgcctattctttacttactagaacttagtggcaattcgactgacgtcaaaaatgttcgtcaaattgttatggaagctcgaaaaaaagaaaaaggtgcacaaaaagatttaccaattcaaaatccagctcttagcaatattagtttcttaagtgacttcaggcagaaaaatgaataaaaaaccttattataaagcaaacaactggaacactgtagaagaacaagtagatcgttctgcttgggcgagattaaatgatattgtttacgaacctcgtcgtgttccaatttataaagatcagaaagagtttcttcatctccctaaaaacgaacaaactgtgattttgcacagttttggctctttaacgctctcttctactctccaaatgaaagtagctctatccgaaataaaaaaagatgctgaaaattctgaagaagttgctgtatataatgcacttcaatatctagaatctattaataataaggcatatagctatgtattagctgaattttctgattctaaaaaacaagaagatgcctatgaatgggcaaaccaaaatccttatctacaaaaaaagatgaaacttctaaatacagtatatcaatcaggaaatactattcagaaaaaagctgctcacgtttttctctcaactggcctttatcattcatcattttttggcccattatatttattcggacagcataaattgcctagaactgccgaattgattaagtatgctcttagaattacaactttaaatggtatttatacgggaattaagtttcggcgagattttttcaaacttcctaagaaagagcagaaaaaagttcatgactgggtatatgatttatgtgataaattatatgacaatgagcttcgccatattaaattattgtataagcatactgatctagaagataaggttgagcattatattcattacaccttaaataaagctcttatgaatttaggtcaagagccaaaatatccggaaaatgtcgaaactttagatccaattttgaccactggtctgatggaaagtgcaatgattgaggatttcttcttttacactaacgcccatcccatcctaaaaatgcgtgaaataacaaaataaggagttagcataaaggctagctccttattttgttttcttagtttttgtttcgggtttttgatagttgcgaattacttcaattttttcttcaattgcttttactagtaatgcactatacttttctggatcagctacaatttcatcacttgaccccagaatatcgattcggaagtgagaaacatttacatattctgaaatagtttcaaaatagatgtttacttcatactcatcttcattattacaaaaattactaatttttttgtagttagcaaatggaagattaatgatattactttcaagggcaaaagtcattggtcttcttccactaatggccagctgcgtttgaatgagggagtcatgtttaaaagcctgcacagcttcattaatcattttagttgcaatattttttaattttgtcttggttatttcgctatatttaattgtctcaagatcttgaagataatcttgttcttcaatttttttagttatttcttcttgtttaattttcacgataaaaattcctttgtgtatcctttttcattactaagatactcaataaatctttttcatgcaactacaaaaattaactactcgtttaatcaagttgcaaagcaaaactaagtaattccattactttaagcatatcttctggtctaagatgatctgctggtttttcatctagcaatctcattctagaaaaagtttgaatttgagctgcatttacacgaccatgaatatgatatccgaacaagtctaagtaggtagggaaatgattaccgtgggatgtaattggacaaaccattagataattagtcttttcattatatgaattagacgacactactacagcaggatgttttcccttcatttcttgtccaactgacggtgaaaaatccgcccacacaatatctccctgtttaaatttattcttcggcatgacgtaattcctccatagccatattttcccaagcttccctttctggtcctggtacatcttcaaatttagcatcggaggtataaggattagaaattttcggtattaaaatcaaacttccatcagctttctgatgaattgcatactcagttcctacctctactttaaaagaagcaggtagtgaaaagccaactgaattaccgaccttttgagttacaatatgatgaatagatattttcataagtttttacctcattaagttactttcaaggatattgtagtactaaaaaagactaactttcaaaagaaagctagtcttttttgcgagaaacatacaaaagtatgtcagggtctttgtttcacagccaaagtagcccatcatcagcacttcccgtgctttgacttcgcaagtctagatgatctctgtcaaagaacgcatctcgcgttttcctcgactcgtcgcatgtcctattataccaaatttttcttgttttttctattttgacgcttcttgaaaaagatttctccaattaactgtgcaagcataaaacccatcgctattgctatcgtgacaattgctacacgcaggatcagatcttctgcatcagataattgaccttctaccatcgcacgcaccgcctggtaggccggtacacctggaactaaaggaactacacccggaatattaaaaacagttactggacactttttaatacgagcaaataccagccctagaattccaacacacagggctcctaaaagattagaccccaatcggccaacaccgattcgatttgccagccagtatagaatccaacctgcacttccgctaatgccacataaaactaaagcgcggtgtgggacgttaataattaacccaaagccaacagctgcaagccatgcaaatactaaattaataattatttctaaccaaaaaggcattacatcacaccccacaacaacttaattgcaataccaattccgccacctaaagcaattgctgttagaacagcctcggttgtccgagccattcctgataataagtcgccaccaaacagatcacgtaatgcattagtgattgctacaccgggcactaaagtcatcaaggaaccaatcaaaatattatcaactacaagcttagggaagattttacacgtcaaaatagtaataactcccataaatattgcagttaccatctcagctaggaagcgaatactagtatagcgcttaatagctaaataaagagcataagatactccgccgatcacagcagcggccggaaaatcaatccagtcataatcatccataaacaagaccattaaagtaggacttaaaatagccgctccaataatttgaagccatattggaaagtctggaattgaaatggaaacttgttttaaacgctcttgtaattcctttaatgttatttctttagccgcgaattcacgtgataattcattaactcgatctactaattctaagttaatatttctttttttaacttgtgtaacctgagtataagagtgttcacccaaactcataaaaattccagttggagtcgtaaaacatcttgcaccagtaatcccggcattacgcgctattctcatcatcgtatcttcaactcgatacgtttcactgccgccttcaatcattaatctaccagcttttaagcaagtatctaaaacttcagcagcataattctgacttacacgctctttttccatttcaatcctctaaatattattcattattcatcttctcaatatcaattgttttatccacccaatttcctctaaagaaatctctctcgtggctaacaataattactccaccattaaattcaacaattgcctttcttaaagaatcttttgtagcaatatctaagtgatttgttggctcatccaagaatagtaaattggatggctcaaactgcatcttagcaagcttgaccttctcttgttctccaccagaaagctcttttaaaggactcatagcctgctgtgcagttaaccccattcttgctaaggcttgtcgtaattctctaggacgcagacgtggaaattcttcttgtaaatattgcaaaggcgtcatatttttattaggccaagctaaatcttgttgaaaataagcaagcttagctgttgaagataattcaaaattaccataaattggttttaactttcctagtaaagtctttagcagtgtagtttttccgattccattaaaacctgttacagctaccttttccccatttccaacagaaaagttaaatgctgattttactaatgcctgttcatatccaattactaaatcttgagtttgcaagagcaagtttgatgcagtgtcaacataagggaaaaggacatgcgcctttttattattttgtggtggcgttaaaatttccatcttcgctagctgtttttcccgcgatttagcacttttagatctagaaccagctttattttttctaatatatgcctcagtcttttgaatttttctctgctggttggcataagcctttaaatagctttctcggtcagcttccttttgacgaagtgcatgctttaaatcacctgtatagcgcgtaatagttccaaaatcaatgtcaataatacagttggtgattctacctaaaaaatcataatcgtgtgaaacaacgataaaagcaccctcaaagttattcaaatagtctgcaagccagtcaatatgattaacatctaagtagtttgtcggctcatctaaaaccagtacgtctggattttgtaaaagaagcttagccaaaatcaacttagatctttgtccaccagaaagttttgatacatcccggctataacccaaatccgctaatcctaaccccgtcgctacgcggtcaattttggtatcaatatcgtaaaattctttttcctcaagtaaagtctgaatcttacctgccttttctaagagagcttcatccccattttcaccatatctcacatagagttcatttaattctttttctttatcaaaaagatcactaaaggcagtctgcaaaaattccttaagctctataccttcttcaagtttggcatactgatctaaatacccaacatgaattttattttgccatttaacctcgccattatcttgagtaatttcaccggtcaaaatcttaattaaagttgatttaccaactccgttttgccctgttacccccatatggtcttctttatttaagacaaaatttgcgtcttcatataaagttttatcaataaatgtctgacttaaatttttaactgttagtaaactcattattttttctctttttcatttgataattgacgctgccgatcatattcttgaagcgcatttaagacttttggccattgtcttttagggataattaactgaagcttattgtgatagattggaaaatcactagccttcatcccagttattttggcaagttcttcatctgttaaatgatatttagctacaattgccttaatttcataagaagcatgtcctctaaaatatgacagaacataaaagaaagccgcaaaaattccagcacttaaaatagccattgatacagaaaaatggaaggttctctgtgcaataaaaaacactgcaataaatgcaataagggctgatattaccccataaataactggaaaatacttagtttgcttcattttttcatcatcctttttattacactgatctttcaaatattacattaaatttacgtaattgaagtttttgtaaaaaaatgtaaatttcgctttaatttactgcaataatcctcttctataatacagtttgttaagtaaattaaaaacgactttttaaatatcactagtgtaacatgattaccatttaattattattaaatttaaacttaaaaggagtaaacactttgacacacaaaaaaggaatttcaatagcgcttattgtattattaggctttggctttttaactaattcagttactacttctcaggcagctgatcaagataccaattttaatgtgtctaaaagcctagttgaaaataccattaaaccaactctcctaagtaaaaagttcaaagaagatcaaataaaagaagaaaaggaaaataaattagccgatatcaagtttgaagaaaaaagaattagtcaagaaaacccaaattctgaattaggtaactaaaactttacaaacaacagttgcagttacggtctaaaatcactaagatagaatcatcaacagatatactaaaaaaagcagttagcattttgctagctgctttttacttaattaccatcccatggaatagtatcagaatctttgtcataaatcacataatctctgaagtcttctggatcattccaatttaaaccttgctgcagactattttgtcttgtttcttggttatggagtttttcctgttttaatcctaaactagaacgaactaaatccgatacgcgttgtagttcctttgtagaggccacttgcattgctgccgctccaatccaaacattatgtccttgaatatagccactcttaatattctgagtacatccgcggtaattcattgcaattgaaagcatatcatcaaaagtcagattagttttaacatacttggcaaagaccttaagaatcttgcgatagttagtgattgaattaactgacatccctttacgtacaatgtcattaatcacctgtctttgtctcatttgtcgaccgtaatcaccttttggatcttctttacgcatccgcacatagtctaaggcctctttcccatttaaatgctgctttcccttcctaaaatgcgtgtgataggtaaaggtaaatggcacattaacatctactccgcccaaagcttctaccatactttctagagctttcatattaacttccatatagtagttaactggtgtatttaaaagtgcttttactgtccgagttgctcctttgcttccgccaacttgataagcagagttagcccggaacatgtagtactttccttctccgcgtccgtcacctttgatatcagctaacaagtctctaggaattgaggtcattgttgcttcttttttctctggattcatagtggctaagatcatcgtatcggaatttccccggtcatgcctgccctcaattccttgatcaacgccaagaattagaattgaaattggctttttctgagaaatcaattgcgatgtttttcctgttcctcgataagcttgttgaactgaactcatagctgagaaatatgcatgagcaaagtaagctacgcttccacaaacaagtaaaattgataagagacctaccaaacgagcaaaattatttccatttttataatcttttttactcgccgcaaacacattatttctttttagtttttggcgtggtcttttgggttcctcaggtctcattaatttttaactcctctgaaaatcagcttaccttttcataatacaaaattacttagttaagcgcattaaattcattattaaaaaaattttattttttagcaagcgaaataatgttctataatgatgattaataaaaattatatggtagaaagaaggacaaggtatggctattccaacaagaaatgaagtatctgatgatctcaaatgggatcttagtcgtgtttttaaagacgatcaggaatgggaacaagaatataatcgggtcgcaatcgaaattaaaaatttaggtagatttaagggaaatcttgctaaatctggtcaagatttatatgaggggattacagaaattttatctgtgaatcgtcgtttagaaaaagtatatgtttatgctactatgtcaagcgacgttgatactagtaatactcattatctaggccttgttgctaaagctcaaagcttagctaaccagatgagcgccgctatctcttttgtcgatcctgaaattttatctatcccagaagagacacttgctaaatttatgcaagatgagccccgtttaaaagagtatcaacatcgacttgaacaaattactaagaaacgtcctcatactttaccagcaagtgaagaaaaaattattgccgctgctggagatgcaatgggaacttccgctaatactttcaatgttttaactaattctgatatggaatacggctatgttcaagatgaagacggagagatggtccaattatctgatggcttatattcacttctaattcagtcacaagatagaaatgttcgcaaaaatgcatttgatgttatgtatgcaagctatggccagtttgaaaatagtctcgcttcaactttatcaggtgaagtaaaagcccacaattttaatgctcaagtacataaatataattcagctcgagaggctgctttaagtgaaaatggcgtaccaacagctgtttacgatacattggttaaagaggtaaatagtcacctcaacttacttcatcgctacgttagtttaagaaaaaagattttaggtctttctgatttacaaatgtatgatatgtatgttccattaacaggtgagcccagtctttcttataactttgaagaagcaaaaaatgaagctagacgagccttagcgccattaggaaaagattacctcgaacatgttgattacatctttaataatcgtgtaattgatgtggttgaaagccaaaataaggtaacaggcgcttattctggtggttcttatgatactgatccatatgaattattaaattgggaggataatcttgattctctatatactctagttcatgaaactggacactcagtgcattcctggtatacaagaaatactcaaccatatgtatatggagactacccaatttttgttgctgaaattgcatcaacaactaatgaaaatattttaactgaatacttcttagataagattactgatcctaaaacacgcgcatttgttttgaatcactatcttgattcattcaagggcacactcttccgtcaaacacaatttgcagaatttgagcagtttattcatgaagctgacgcaaatggtcaaccattaactgccgatgttcttgatgaattttacggcaatttaaaccaaagatattacggtgatagtgtagaaccgggcggagagattgctaaagaatgggcccgtattcctcatttctattacaacttttatgtttaccaatatgcaacaggctttgctgctgctacagctctcgcaaataatgttgttcatggtactgacaaagaacgtaccgcttatattaatttcttaaaggctggctcttcagattatccaacagagataatgaaacgtgccggtgtcgatatgacaaaggccgattacttaaaagacgcatttaacacctttgaagaacgccttaatgagtttgaaaaaatcgttgatgaattgaaaacaatctagtaaaaacacaaatatatttgtaaacaaaaagttcttgatctaacttctgagatcaagaactttttactttatactaatttagtaatcaaaccaactaagtatagaaatacacaggtaattaacaagtaaatactaccccacttagtcgtttcttttagaatctttccttctaaaccttctttattaattgcaccagtagctactgcaatattctgtggtgataacatcccagcagttgcaccagtcatatttgaagcaacaatccaatatttgcttactcctaatgattgagcagcagaatactgtaagttaccaaatagaacgttggctgacgttgcagagcctgttaagaatgttcctagagccccaattaatggtgcaaataaaggataagctggtccaagtaagcttactaaggctaccgctaatgctttagtcattcctgcatataccataactttagctaaacccacaattgcacaaactgtaattgttgtcatcccaattgttttcaaaacattgagcaagattttgaacatttggcttaagcttaagccttgaatctttcctccaattattcccgctaataaaattaatgttcctggagaagaaagccaattaattggtagatcattaggattctttcctaagtaaacatgtaagtgagtagttacactagttaaaaagttattcacaggtggacaaagagatgaagctagtagaacgaaaataaagaccaggataaatggtgaacaagccttgagaatctcgctaacactttcattttctacttcctctactgaaccagtttttctcttagtcaaccagacagtaactaaaattgaaaacaatgatccgactaaggctggaagctcagccccagtaaacttagcaataataacttgcggaattgccattccaacccctgacattaaagtaataaagacaatacctttaagggccttaatacttttaccagtaagaataactaaaataaaaggtactaaaataactaaaatgaccaattgcaaggttacaataaatcctaattgcacatcattaagattagttacttcagctaatgtcaaaactggcaagccaattgcaccaaatgcagttgccgtactattggcaaccaaacaaattactgaagcttggatcggttctaaacctaaagaaattaaaattcctgcacagattgctacagcagtcccaaaaccagcgatagattctagaaagccaccaaaaccccaagcaattattaatactaaaattcttttatcggttgtgattgatgataataatttttcaatcgtccccatactacctgaatcagttgtaatctgatatataaaaagcgcagccaaaattacatacatgattggccaaattcccattataataccttctaaggctccagaaagagtattaattatgggttgtttaaacattaaaacagcatcagcaattgtaataattaaaccaatcgtacatgcccttgaagccggcataccaataattccaagagaaattatcaaccagatgattggcactaatgcccataaaaaatttatccacatagttttcctcatctaaaaaagtaatactatttaattttatcctttttccacatattaaggaaatttaaaaacaaaaaacctacaagagcaagagagcccttgtaggttctaaataacagttttatttcttaaaagcatgaacgccataaacaaataaataaattccaacttcaataatcgaaataaagaaagtgaccggtaaattagttacgtatcctaaaactaaacctgcccaaactccaaacaaggcgatcccaactgaccaacataacatagcaggaattgtcttacctaagtagcgagcacttgaagatggcaaagttaataaaataaagactaataatgatccgacaacttgtgcaccaattgaaacagctaaagccaaagcaattaaaaatactactgaaactaagcttgtattaatatgatggctaactgcccctacatgatcaaatgaatcatagtttaactgtcttaaaactaggaaaattattgctaaaacaaagagagaaagaacaactagttgaatgactccatctctatcaactccaataattgaaccaaataagatgttagtcgcatagcgactattaccgccagcaatagctaaaaatagtacacccaagccaataaacaaggctgaaatcgcactaattgcggattctttctgatcacttctcatggataattcaccaacactgattgagccaagcaaagtaaaaagaaccatgccccagagaggaacccaaccaatccaaaccgcaaaagcggctccggcaaaaccaatttctgatagagtgtgagctaagaatgaaaaacttctagctacaacatatacacccactattccacaggtaatagcaataaaagtactagctagaaatgcatagcgcataaaatcatatgcaaacattattcttcacccacctcttcagttaagtctttaattttaccagcaattaaacctttatccttaaataaaagataatctttcatatatttcttagctagaggaatgtcatgagttgtaaacaaaacagtcattgcgtgtttttcgtttaagtgcttaatcaatgacattaactcttctttagcaactggatctaagctagctgttgcctcgtctaaaataatgaagtctggtttatctaacaaagcttgagctaaatatgcacgctgcttttgacctccggaagcttcacccatcctagtattttgaatatctagtaaatgagtctcttttaaaatttgatttactctcgccttcacccgagcgttcttaaataaaggagtattaagttctacaaaggcccggattgagaggggataatcagcatccaaatttctaaattgcggtacgtaccccacttttgtatctggcgcaaatttaaacgatcctgtcgttggttgtaacattcccatcaaaattctaatcaaggttgtttttcctgtaccatttgcaccaagtagagctgtcatcgaccccttcgatagggtaaaattcaagtctttaaaaattaccttatcctcaaatttcatccccaggtctttaactgttaatatatcagtcatctcactcctcctcttcttctaataaaccaatcctatttaattattttgaatatcagctagtttttgataattttctttcatccaagctaagtaagtagtgttattaggaatagtttcccgaacatttaaaactggaacattgttcttttttgcaagtttaacaaaagacttaactgttgagctacttgcctgagtattattaacaaaaaaggcaatcttcttttgtttaatagcattattcatttcgttaattgtcttaggactaggatctgtaccattttcaatggcttcttcaaatttcttgtcgcctattttataaccagcttcttgcaaagcatagtcaaagactggttcactaacaaaaactggtttttgatcacccttattagcctgagctagctgtttgattttgtcgatcttggctaagtatttttcgccattttccttaaaataagcggcatgcttcttatccaacttagataaacgcttaaccaaataatcaacgtacttagttggcatatctaaattgtaccaaatatgtggattatctccgctctttaatcccatcaagtcttcaccgactaagacaggctttttatcaacagatttcgctaacttattcatccatgaatcataacctagcccatttgcaacaataatatttgcctgagctacctttttagcatctgctgttgtcggatcaaaatcgtgtggatcaacgctacttttatcaataattgcagtcgctgttccatattttccaacaatatttttagcaatatctgaataaacattagttgtagtaactatagaaattttatctgattgtttggcagaattttgcttattcgaacatcctaccgttatcaatgatacaagcgtcactaagctcataatagaaataaattttgtaattttagatttaaaattttgcatatatatcctcctgtgcaaaacaaaaaagcattaagttagaaaattcagcataagttctaacttaaagttagactaagctaaattttttattatgtcaacatttttctagatagacaaatagcaccaagacgtctcagacttgatgctatcaataagtataaataataaaaaatttgctgaatttttaatttaatgctttttctctaaaattacatctttatataaacatatttttatatgtttgtcaaagatgttcagaaaaaagacagtcaaaatgctgtgattattcaagtccttgaactaaaaatcttcattaacgtgccgtctcaagacatctagaatcttaattacatgcttatcttctaagctatagtaccgctcttgcttaacttgctcactcttaactagcttagcctcttctaagattcttaagtgcctagaaatagctggctgactaacatcaaactgttttaccaagttatttacactacttttttgattgtcatttaagtaataaagaatttgaattcgaatgggatgatttaaagctctagtaactcgaataatttgatcgttcaacttgttcacctatctcaacttacatttaattatgagagtaactcaagaattttcttttgcacacttgattcttcactagatccaatgatttgattcgcagctttctttgcatctggaagagcggtagccgtagcaaagctcgtacctgcaaacttaagcataccaacatcattaccactatcaccaaatgtcaccatttcactagatttaatcttcagttttttacctaaatattctaaacctacggctttattcattcctttagtctgcatatcaatagcagtacttgcacctgagacaaaaccaatctgtggataatcttctctaagtttatctaagaccttaggcatcttatcttctggaacacgaagacttactttaaaaatacgatcatcgatatcgttaaagctatcaacaacttgaattttcttaacgtacttttttagatcttccgcaaattcttttccactgcttttttcaacatatgcactagttacaccagcaacaatagccttatatggtaatttttccacaatttcaagcatggtttgataatcttcgtcagataaatcagatatttgaagaatttcatttccatgagctactaaagcaccattttcagccacaaagtacatattcttattagcttttggaaaacgatcgaggatattttcatactgattaccactagcaataacaaatttaatatcacgatcctgcataatttgaaattctttttcaaagagttccttatcataagtcttatcttctcttaaccaagtaccatccatatcagttgcaataagcttaatcattttcagtctcactttccacttttattatccacactccactatactaaaaaacgccacccggaggtagcgtttttcacaaaactattttattcaactaatttaatctttcttgcgttttctagtacctgctaagcctaaaagtgacgcaatggttgctaatcctagtccaataagtcctgcattagaatgtttatgaccagtttgaggtaatgaaacatcctcagttgtagctgcttctactttaccagattctttggtttctacagttgctacttccttaagagtagtatcagtggaaagttggtctggaagaataggagcatcattagttgattcagttggagtttcagcttgaactggaacttttgaatcctctggatcttctgggtcctttggttcttctggatccactggatccttcggttcttctggatctactgggtccttcggttcttctggatcctttggttcttctggatccaccggatcctttggttcttctggatctactgggtcctttggttcttctggatctacgatatccttattgtaaactacagtttcaatgatatcgtcagtattattatctacattttcaagactgccaatttctttcctatctggagtgtagccggcaatatctggagaaatgacttgtataaatgtagttccatcaagtgctgtccatttaattccatcagaaatctttctgccatttttatctaagataataacttcgccagttactttatcaataatggctgtaccacggaatcttagcttttgaactacctcatcttttgctttagtcccatctgcgtaaacatatttaattgtacgagtaattgttttatctaaagcaattgaatcaaatggatattttggtccatctgggttgtctgggttaattggatcctcttcggtaaatttatcatcaggagtaactgtaactgttccatgtttgaatgttacatagaaagtctttgtgtcttcaccaaattctccaccaacataaccatctttgactaattcatagcctaaactttcatagtatttaatcttatctgctgtgctgtagttaattgtctcgttgtacttaccatcaactactgcagtttctaattgcttgcctgtagtctcatcaacatagataatttctgccttagctgcatttgcagtgtagataactgttgtttctaggttcttactatcttggttaattccttcaactgcattaactactcctttatctggagtgtagccaacaattgttggagaaactacttcgacaaacgttgttccatcactagctgtccaagttaatttgccgggaattgggttaccgttctcgtcaagcttaacattaccattttcatcgacttctacatattgaccagttaccttgtcaatcacacctgaaccaacaaaagttaaagtttgtgtgtgactcggcttagctgttgttccatctgcataaacatagtggatagtattagttacatccttgttcaagttagcagaatcagctgggtattttggtccatctggattgtctgggttaattggttcatctggcttgcctggagtttctggatttacaactaccattccatgcttgaacgttacatagaaagtctttgtgtcttcaccgaattctccaccaacataaccatctttgactaattcatagcctaagctttcgtagtatttaatcttatcggctgtactgtagttaattgtttcgttgtacttaccgtcaactactgcagtttctaattgcttaccggtagtctcatcaacatagataatttctgcattagctgcatttgcagtataagtaaccacaattaccttgtttggagtattttcagttacagaacttccagaaacccaagttttatctgctgtataaccagctagagtaggtgatattacttcagcaaatttcggatctgttatatctgctttccaagtaagtgtcccttcaattggttgtttattttcatcaacaacaatcttgccattttcatcaagaactacatattttccagttgttttatctacaacaccgtatgctgtaaatttgatattttgcttattactttcagctgcggtactgccattttcaaaaacatattgaatctcttgaattacttctttaatgtaatcttctgatccgtaagctgggctatcgggattcgttggatcaataatgatcaaatctctagttaaatgaattgtaaagttattcttagcttcatctgcagaatagtagtaatctttaccaaattcatagtcactacttacaagtttgtatccactttctataaacaggttaaggacattttcatggttttgtttccagttaatttgatgatccactttaccctgtacttcatccctaccgataactagtccagttacgtcatcaatgtattggatgctagctcccgtttgatttgcataataaagaacttcttcagtgatattatcagagcttccacttactatcttagcttctacaattcctctatctgcgccataccctgtaacctttggtgattctactggagcaaaagtatagttcatatcgccggcttcagttgtccaaacaatatcaccaatccaagctttatcaacagagtcatattggcccgttccaataaatgtaactttttgagcaacagaatttgcagcttcttggtctttattaggtccatctgcataaacataagtaatcactcggtttacttctttattttgtgtattttcagcgattttatgttttaaaataaccctaaaatcattacagccaggattgtactctgcatccccaaatgttgtggcataagttaaaggattacttactagtatatagttattattttcatagtctttgatgctatttaaaacattttcaattatttgatagttaattacttcccggtaattacccgcaatattgatagttgatccaagttgcttgttagaagtttcatcccaaaaagtaattgtaccaacttgagcttttttatcataaacaatattttctactctatgctttacatcctgatctactttatccgcagtactccatttttgtgtagtagtgtaaccaacaatatctggagatttgatcgattcaaagacatccgtcttagaagtccactgtaaactagcgtccttattggtaatttcaatagcaattacgtaaccatcatcgtgttcaacttctgttacttctacaatctttccagtcactttatcacgataaccattcgtcttgaaaatggctgtttgtgtaactgaatcatgtagcttattaccaaccccatctacatagttgataattttatctacagattgtgattcattaatttcttcaagaccatgctttaactcaatcttaaattctaaatcttttacatcaaattttgttcctggtttaaaatcattgctaataactacatatcctctatcaatcaagtcttggagtgtagtacttaagtcaacaaaattaattacagaatatacttttccagttgcatttaattctgcaactttaccaccattattctctaaattatctaaatcaacaatggtaattgtagctttagcatcctcacgtaaacgatatacaaccttgatatctttacccggatcttctggagttacaaattcaatatcagcaatatatccctcaataaccggtgtataggttagaccagccttagtcggatcatctttatcattgttaaattttacagatggatgaatttctttcccgttttcatcaactaaaattaaagaacctaattctttataaacaaactgtacttcatgagctgagtcagttacgaatgggtttctagctgtgtagttgttatgagagaagttaactgatttaccagcttctacagtatggctttcaataaccttagtcatgtctttgccatcatacatcaaaacttccatcttaccagtagcgtcaatttgacggtaaactactgtaaaatctacagttaactgatcaatagtaccttcatttttatctccagcactgtagtatactttcttatagtaactaccatctccaaattgagaaagtgttccagtaaatgaaccagtaggaagttttgaagcatctaagtaaaagccattaattagctgtttgtattgatcaacgttgtcaacaataaatccttgcccagtccaaccagatatgttaacgtttggatatttatcagtgcctggaatttctattaaattgccattttgattgtaatagtatttaatcacagactgttcagtataaactgggataatttcaccaattgaactcgcatctatgctagtactattgcctagacaatattcaattcttgtacttcccacaactgtactagcgtttccaacaggcgtttcacttccattaatagaaatattagatttaccactgttaactactaaaaattttacagtgtgccacccattgactacctcaatattcttaaaatggcctgcttgaatagtatgggtagacaaaatttcagtaaaactattgtcagttacatatgcataaagattgtcatcggatagattatttcgatttacagacaagataagctttttgttatcactactcacaaaacttgtaccattcaagtttaaaatttgataaatgtacctattatcaccaattaaatctcccgcttttttcggataattatccgcatctgttcccagaatagttacagcagctttactttgaacttccttagcattcgactgaatagttatattttctttaaccactgattcttcaattggagaagcttcattttcaaccttagtttcagcttcaataggctgatctgcttctacagatacagtattgttttctaccttctcagctggttgtgtttcttctacggaaactgtattgctttctacgctttcaactggctgtacatctacagaagcagcatttttctctacgtcttcaactgcttgagcttcttctacaggagtagtattttcaactaaattagtttcagttgtattagtattttaattttttactgctgtgtctccattaattgactcagcattataagttactacttcgttagttgcttgtttgtctacattatctgtttctacagaagaaatcgaccgatcattttttacttcttcattaccagtctcaccagaagcagttacatcattttctacttcattattttcttctgccgacataacttctgtttgattgtcagtagtagatatactctgttcctcagtatttactacgttatccatcgtctctgttatgtcactagctgtactactttcgacttttacgctttcctctggagcaactgtagtgtcagcttgagcttcctgattattaacccccataaaggttaaaccaattaatacagaagcagcccctacagtaaacttacgaatagagaagcgttgcttttgcggtctaatttttcgcattttttcactataattgttcttggaaaccataattttatcctcatacttctagtattaggtgagcattaagttatagctttcttgctaatgattattaagataataatcatttatttcaccttgttatatttgttttttacattaagtaagtatacggataatctatgatttaattgtgtacaatttatgatatttgtgtgaacttgtaatctatttatatattatttttctttatatatcaataagaatgcgatttcaaaaatcttgcattttcaatgctatacattactatagtaaatatatgttatttattaaacaaaaaagtaagattctaaaatttttcagaatcttactttttaattagttatttttattcatctgggtcttcagagataggtttcttccagaaactcataattagaccggctacaatagaaccaacaattgtagctacgaagtaaagtaaaatatggttagataatggtgatacccatagtcctccgtgaggagctggtacttggatgtgccacaatccaacaagtaaaccaccaactgctgaaccaattacacaggaaggaattacacgacctgggtcagctgcagcaaatggaatagcaccttcagtaatgaatgagaaacctaaaatccagtttgatacaccagcacgacgctcttccttagtgtaacggttcttaaagaaagtagtaccaattgcagtagcaaatggaggaaccataccaccaaccataacagctgccatcataactgcagcagttgcagaatgtggatcgttagcaaatgcacctgaagcaaagacataagcagccttgttgaaaggaccacccatatcgatagccatcataccagctaagatcattgtcaaaattacaaggttaccagtacccatactgttcaagaagtgggtaatagcaaagttaactgaactaaagattgggttgatgatgtagaacataatcaaagcaataaaaagcaagcccaaaattgggtaaagcaacattggcttcataccttctactgattttggaagtttagcaaataacttcttcaatccaatcatcatatatccagcaatgaaacctgcagcgataccacctaagaatccagctggagatacagcatgtgcttgtgcgttaacttgtaagccgttagtaccgttaacaatggctgccatgtatccaccaacaaaccctggcatcaaggcaggtaagtcgccgattgattcagcaatataagcagctaatacaggaaccataaatgcaaaggctaagttaccagcactatttaagaaaataaatgcagggttcttagcgccaccagccatatagttttccactatgaaggagatggccattaagataccaccaccgataacgaatggaagcatgtggctaataccactcattaagttcttgtagatagatgcccacaacccttgtttttcttttgcatcattatcgctagaacttgcactactatcagcatggtaaattggagccttgttttctaagatatcttcaatcaattcttttggatggttaataccatctacaacaggcttcataacaagttctttaccattgaaacgtggcatatcaacttttttatcagaggcaatgatgacaccttttgctcgtttaatttcttctggagtaagcttatcttttacaccttcagaaccgttagtttcaatacgaacatcaacgcctaattttttaccagccttaattaaagcttcttgagccatgtaagtgtgtgcaataccattgatacatgcagtaacaccaacaattaaaggcttttgctcgctagcaggcttagatgcttcttttgcagcttcggcctttctcttttcggcatcggccttgtcctgagcatccttttcagcttctgcttttttaaagatatcaataacttcttctggtgtagttgctgcctttaaagcattaacaacatctggattaattagtaaacttgataacttagctaaagcttgtaagtgtgtgttatcagcaccggctggtgcagtaatcataaagaataaatgaactggttgtccatcaagagctttataatcaattcctttaggactttttgcaaataaaacagcggcacgattaatgtacttgtttcttgcgtgtggcatggcgattccttcaccaataccagttgttgattctttttcacgagcccagattgatttaatgaattcctcttcgttatttacaacaccttgctttacttcaagatcagccatttctttaatagcttcttcttgagtagtagccttcagatccataatcattaaatcaggacttaaaagatcttcaattttcatgaaaataactccctatcctaactgtattatttagttttaactactttacttcttcaactgtaatttgtggtaaaacagcatcaatttgactcttaactgcaatatcttcagtaaatgcagtagcaccaccacaagcagatccgactttcaatgcttcaacaacattatgagtcttgtagtaagtacctacaaagccggcaatcattgaatctccagcgccaactgagttaacagcagtaccaacagcagcacttgcatggtaaatatgatccttagttactaagtatgcaccgtcgccagccatagaaatcatgacgttttgtgcacccatgtctaaaagtttcttagctgcttcaagcatttcttgatcattagcaaagcttgtatcaaataaagctgctaattcatgatggttaggcttaataactaatgggtggtacttcaaagttgcaagtaaagcttccccagtagtatcaattgcaaattcagcaccagcttctctgatagttggtaataattgttcatagaagtcagttggtaaacttggtgctaaactaccacttaatacaacaatatcgccttcattaagatcatccaaacgcgccttaaaagcagtaatttcttgtgcatcaatctttggaccagccgcattaatttcagtttctttttgagcatgaattttcacattaacacgggtatcgtcagaaatagttacaaaatcactttcaatttttttaacgtttaattggcgaactaattctttgccagtaaaaccaccaacaaatccccaagcagtgttatcaacatcaagttggttcaaaatttgagaaacattaattcctttaccaccagctaaaaattgacaatcatttgaacggttaacactaccagcttccaccttttctaattgcataacatagtctaatgctggattaactgtaacagtataaatcatgaccgagcctcctcaactctgatttgttcaggtaagatattttctttacctgtacttaaattgttagtgatgagtattgcctcattgatatgtgcaaaacttgcaaaatttgctacaccaatcttactactatccattaaaataaacgattctttagcctgctcaattgcagctttttttatcccagcttctgctggatctggcgtagtaaattggccatctgctgttaaaccattagctccaataaatgaaactgtaaaattcatttcttgtagctgcttcatagctgtattgcctatgactgcatgcgtttcaagcttagcctcgccccctaacaagcgagtatgaattccattgtctaaacatgctagtgcaacatcaacgccattagtaactacatgtaaatcattaacttctcgcaaaaatggcaccatttcataagttgtcgttccagcatcaagaaaaatatgatctccattagtaacatgatttatcacagcaaaacgtgcaatctcacgtttattgtcaacattaagattaaatctcacttgttgttcaacatcacgtgaataatcttgcagtgagcgtgctcctccgtgtacacgaacaatcacgccacgcttttctaattcaatgaggtcacggcgaattgttgactctgatgacttagtcaacttacacaattcattaacacgacagatactgtgtttattaatataggttgctatagcttgttgacgttcctcggtcagcatcgttcatcatcacctcatttaatatgataaacgctttcagatataaattcaatcatttttcgtcaaaatcattcatattcattcaatattagtcaaaactaaagctattaaaagtgaaaagttttctatataaaaaatgagctagcacaacatcgcactagctcattttcattaaattaattaacctgtatatattttctatctttataaataaaattcattttttcattagtagtcctaatttcaattctttgataatttggctcatatccatgctttttcaaattgatagtaactttatgaccatctacatttatctcataaagattgtactcacccttttgataaccaaaatcggttccattatcctgatagtgagtatatttaccacgttcaccaaacactctaaatgtcattttttcatctggtctagtggaaatatgttccttaacttctccccacggcaaaatagtatttttcttaataaataagggtaacctatcaatcggggcactaactaagatcgtattattaccgctataagtaacattattccaaaaatcaatccattccccttctggtaagtaaacagctcgccactttttaccttcttcaacaattggcgctaccacaatatttgtaccaaccatatattcgtcattcatatttttaactgctggatcagttggatagtttaaaaccaaaggtcgcataatcggaagcccagtcttattttcttgagcaaataaatcataaagatatggaataaaatgatagcgcaaatgtaagtacttgcgatatatcgatagcgttggttctccaaagatccatggctcttgcgagcgtgtacccatagccgcatgatttcgaagaagaggactaaaaagtgctgcttcaatccatcttgttaatagttctggtgtagtatctgcaccaaatcctccgatatctgtcccagcaaaagcaaaaccgctcattcctaaattacatagttgcggaatcatcatttgtaaatggacccataaactttgattatcaccagtccaaactgtggagtatttttgtgttcccgcataagcagcacgggtaatcacaaatgggcgtttaccagttaaattctttaagccataataggttgctttagccatattgtgaccataaacattatgcattttagcatgtgttgattccttttcttcatcattaaaaataatatcttttggaatttctccattaaatgaggccggctcattcatatcgtcccagattccatcaacacctacatcaactaaaaacttacaattttctgaccaccattttctgactgcttcacgaccaaaatctgggtaaacagcatccccgggccaaactttattaacataaacttgcccattcggtgcttttacaaaatatccttttttaattccttcttggtagatctgataactatcatcttttttgacaccaggatcaataattgtaatcacatggaaacctaatttatgaagtttatcaataaattttttcggatcatcataggtatctgtcctccacgtaaaaactcgatagccatccatataatcaatatctaaatggatagcatcgcatggcagatgatatttgcgcattttagtaacaattttttctaccttttcagcgcttatactatatccccaccgggattgttgataacctaatgtccacttttgtggtagcggtgtttttccagttaagtaagtataattttcaacaattttctttaagttactaccaccaataatgtaataatcaatatttccattatcagctgcaatatagtagtatttattgctttctttgcctaaatcaaaataactatgataagtattatcgaaaaaaattccgtatggatgattgttcttcaacccaattagaaatggaacagacttatataaacgagtaaagctttccacctgcggctcgggattatctgtattccagttttcatacgcatagtgacgcttatttaaaaaaccggtcttatcacctaagccataaaattgctcatcttctgctaattctttgactagttcatagtagtggccatcttttcttctactagtagccacttcatgcccttccgactctgccaacttttgctggctcgaatctatttgtcggtcaattggaactctagagccccgatagtcaataattaagggattttcttctgcatcataaacatctattttttcgtcgtgataaactttaatgattaattttaaagtttttatttcaagatagtcattctttttctcaactttaaatttagtctcttttatcttatttccttcaattgcatatgaattagtatgctcaccgcgattttgaaatacacggattatctcaggtgttaagattgttaattcaagactagaattaacaaaatttatctttattttgtttttattaattgcatatgtttctaaactatttgtattcataattaagcctctacattatttgtattcgctttcaattttatcacaaaaaactactcaacttttgaaagctgagtagttaaatttttattccttaatgccttgtaatgcacgcttcatattcttccacataccgttatcatcagtttgcaaaataagacttggataaatttttctaatccaccaaatcgatcctagcaaaaatactaatagaattattagagagattgctgcctctaagccagtcgcgtttcctttaattagtcgaaggggcattaagaaagatgataaaaatggtatgtaagacataatcatggcaaaaataccatcaggattattagataagctcatactactaaataatccgagtagagttaaataaactaagggttgtactgccttgttagcatcttcagctttagtgacaattgcaccacaaacagccgcataaacgatatataggatcaagccaagcacgacgaataataatccccaagaaattatttgtcctaaagcttgatcgatagcaggctttatttgagcaaatgtatcttttactccgtcaatatgaggagccatataataaaagccagaaaacatcacagcataaattaataactgagttagaatttcaaggaaaatacccaacactttaccatcgaagtactttccaccaggcatgcttgaaaagatcatttccataattttagttcccttttcactggcaatatcctgtgccatgatggtgctataagtctgaaccaaaaagtataaaacaaaaattagaatccaaaaagtagctgtctttaaattcttttcatcacttgcattcaattttttatcattagttttctcagtaaatttaactttttgagaaagtgactgcatctgttgctcactgagcttagcgttttttagattaagtgcttgctgctgagtgtttaaaactctgatcaactcagtcttaacatcattatcaaggctttcggtaccatagtagttcgcaactaattgagtagaagtctctttcaccacaatataaccactaatatcaccatctttataggccttttcagcttttgccttatttttatatccatcaaaatcttctgttttctttaatggctgaacaatactctgattttgacttactattcctacctttgtatcactgtcgaaagctgaagatgaactcatcccaaagaaaaaagaaatcaataatacaagaaatggtgcgaaaatcatcaataaaaatgaccaattttttacttctctacgatatgtttctttagcaactaaccaagttttattcattctcttcaccggctttcattttgaaaatttcatctaaagttggtggctcttgatcaaaagtttgcaagtattttccatgggagagcgtattaaaaatttcttttccgtaactagcgtttgttaaccaaagtttgtagataccattattctgtaaaatagcattttcaaccccaggtaaatttttaacattatcaagattcaggtcagttctaataaacaatcgagttaaaccaaaattattgcgaacatcatttacagcaccgtttaacacaatatgtccattattaatcattactacatcgtcacacaatttctcaacattagacatatcatgatcagaaaatagaatagtagctccgcgtttcttttcttgtaagattacctctttaattatttcgacgtttaccggatcgagcccactaaaaggctcatccaaaataattaagtttggctgatgaataagagtcgcaattaattggattttttgttgattacctttagataaactttttattttatcggtaatttggcctttaacttctaacttttgcatccaatcttgcaaatcatgttttacttcatcttttttcattccctttaaactagccaaaaaacttacttgctctaaaacagttaattttggcattaagctacgctcttcaggtaaatagccgacagagttataatcccgacttgaaaaagaatgtccatcaatagtaatttttccctgatatttgacaaactttaagatgctatgaaaaagagttgtttttcctgagccgtttttaccaattaagcctaatatctttccattgtctgctttgaagttaatatcaaacaaaacttgtttgcttccaaagcttttatttaagttctctacttgtaacatagttttttctttctagataaattttattaaagttagccttaattatatcaatattttttcttaaatatactttattggatcaaaaaagcctctcagttgtccaaatctgagaggctttttatctttatttatacatatattttgcagtagcttctttaggatccattccatttcgaatctttaaagcaagttcaattgaaacatctgcgataattgactgcggatcaatgacattatatgggtgatctggtgctttttcctgggcaagagataattcagtacatcccagtaaaattacattacatccatattcatcatgcattgtttttaaaattttatggtataagtcatggtcaacaatacctttttccttaatgtcacgataaattagctcattaaccattggttgaatttcaggcccacctagttcagcttttttaccaactcgttctaattcatccacatataaatgatcataaatagaaccttcagttgcaattaaaccaattttctcttcttttggaaaatcatccacaaacttatgaacagcaatacgcatcatatgtaaaaatggtacgcctgttaatgctgccaagtcatcataaaagtaatgagcagtattgcatggcattacgaaaaagtcaggattaagttttgattgacttaaaacatcatcctttaaatcatagaaaaaattaggttgactatgatccataatgtatgcagttcgatcaggaatttgagcatcatttactaaaatataatttaaatagtcctgatccttagtaatcttaactcggtgattaatcaaacggacataactttcagtcgcaattgtccccattccaccgataattgagaaaaagtgcttcattcctattcctcatcatctttttctagttcattaattacactttccgcaactttgatgtcagttggatatggtgtatctactccgcgaatcttttggtatgggtcggctcccttaccacaaatcaaaacgatgtcatccttatcggacattgcaattgcatcatgaattgccttttcacgatctaactcaattgtgacatcaactttttcatgatcaatgcctgcatcaatttcctgtgcgatatccattggatcttcaaaaccaggatcatcagttgttaaaaaggctttatctgcataagcagttaaactctcactaaatcctggtcgacgtgatactcctttatcaccaggagctccaacaactacgatgatttttggattgttaaattcacgctgcataaagctcattaaagccatcattgaagccttattatgtgcataatcaacaattacagtaccatgattctttgatggcaaagcttccattcttcctggaatagtaacgtgacgaatacctttagcacattcttcataattttcgccggcaagtccagcaccaataatagcagcagtaccattcatttcgttgaaatcaccaatcatttgaagagtgtagtcaccagcaattggtaatttcttagctttatcagatgcacagaataatttgaattcagtttctttcatatcagtttcaactgattggaaacggaaatcaattggttgctttaagttaggattttcaaaatcatttctggcaaataaatagatactatctggattcgtagtagtagttgcagctgcataaatctcatcaaagtgatcagacattgcattgataatacacttacgtgagttaaccattaattgcaacttacagtgcaaataatctgcaaagttagggtgttcatttggtccaatgtgatctggagtaatatttaagaaaaatccgagatcgtaagttaaaccaaagacacgatttttcttataagcctgactagaaacttccattactaaatgagtcataccgttatcaacagctgttctcatatctctgaacaagtctaaactttcgggtgtagttaaactcgccttaaatttgtcttcaggctttggtcctacaatatcatctactgatgaaaatagtgctgttcgaccaccattaatttggtcaagcatccccttcaagaaatatgcagatgttgtcttaccctttgtaccggtaaaggctactacatataaatcatcttgcgggaatctgtaaaaggcagcagataaaagagccatggctttagttacatctctaacaactaaagcatgcattcctttaccttctggatatggttgttctgctacataacaagtagctccactatctttagccattgataaataagtaggtctaaagcctttacctttacagaaaaacaaagtatttgtttttatatcacgtgaatcataggaaatataatccattttagttggaaccgcatcttgaacagcgcttgatttaagcaagtggtgttccttcaatattaagatgcaagtgtttaaagaaatgctagaatcgctcattttttctctccaatttttaaatcaattcagcctaaattatagcacaccatcttttttctttgggctatggagtggtagttgaataataaaactggttaattctgccgttgattgacatttaatattaccaccatgcaaatcaacaatacttttggttatcgctaaccccagtcctgttccaccagtttttaaatttcttgaactttcgacacgataaaaacgatcgaaaatcttttgcaaagatttcttagggatttgttccccattattttcaactctaagttctacaaattcgttatttaccttatttgcaattaagttgatttcagttgctccatgtccatactttagagcatttgaaatcaaattatttaacattcgcacaatcatctttgcatctgcatcaattacgaggtctcttggcctggttatcacattaaaagtaatgtttttcttttcagcttctaattcaaaaccagcagctacttgctcaagcatcgaattaacatgcagcggtgttaaaactaatttattatttgtcgaagagcgcagagtagtatattcaaatagatcttcagctagggccttcatttgaagagctttatcataagctatttgaatgtacttagtttgatcctcatttagctcactgctctttaataagccaagatagccaataatcgaagttagtggtgttctaatatcatgagaaacattagtaattaagtcatcctttgattgctctatctgccgttcctcttccattgaagcaacagtactatcaactaacgcattaattgaatcaatcactttttgcaaatctgtctttacaacaaagggaattcgatgatcaaaatgaccatctgcaatatagtgtaattcatcaataacgtgacgtaattgcatttgtcgatatcttctgattaagcgccagtacactacaatggcatcgccgactaacataaagctaataaaaagccgttgccaagaccataaatgcatcccattagcaaaagtaatggttttcttcaaaaagaaaattccattttctaatctaggatcatttaagacagctaggttaatcaagataatgatcgaaaggttcaagagtaaaagcaaaataacggttattacgccttcaccgaaaagttcgcttttttcttttgtggttaggattactttctgctttttcatccctactaagcctctactttatagcctactccccagactgtttgaataacttcttcaccatcagttgccttttgaatcttatcacgtaagtgagaaacatgtaccataacagtttttgcagaaacaactgattcttgttgccacactctttcgaagatttcatcagcactaaaaactctattaggatgactagcaagcatatataaaattccaaactctaaggcagttaattggataaccttaccagttaaagttttaacttcatgtgaatctttattaatcactaaaggtcctacttctaatacatctggcttatcatcttttacttctttctggctacgacgaagaagtgaccgtacacgtgccattacctctaatggattaaatggcttaactacatagtcatctgctccagtaatcaaaccttgaattttgtccatatcactagttttagcagaaacaactaaaattggaatctccgaatcttttctaacttccttgataacttcaatacccgacatttgcggcatcataatatcaaggatcattaatgcaatttctggattagtagaaagctttgttaaggcttctttaccgctatatgcagcaatcggttcataaccttcattttttaaatatatacttaataattcaacgatttctttatcatcatcaacaactaagatcttcatgaggattgctccttgtctataattatttatcacataaaaaatctattattaacattctacctgttttctttctaattacctaaattaaaccacgtttttaaagaattataaaaaatggatccgagaaaagtatctaggctccatttttaactaatctaattcttttttaccagtgtacaactcgtagtagtagcctttttgttttaaaagctcttcatgagtaccacgttcaataatatgaccatggtctaaaaccaaaatgagatctgagttaacaattgttgataaccggtgagcaataacaaaactagttctaccagcaagtaagttgtccataccggcttgaaccatacgttcagttctagtatcaatacttgaagttgcttcatctagaatcattaccggttcatccgcaatcatcgctctagcaatactgagcagttgcatttgaccttgagacaaatcgccgccatcaccatcaattacagtttcatatccgtcatcaagttcatgaataaactcatctgcatgtgctaaacgcgcagcttgatatacttcatcatcactagcatcaggtttaccaaaacgaatattatccataatagtcccagtaaagaggtgagtttcttgtaaaacaatcgacaaagaatgccttaaatcattttttctaatttgagaaattggaacaccatcataggttatctttccagattgaatctcatagaaacgattaagcatatttgaaatagtcgtcttaccggcaccagtttcaccaactaacgcaactttcattcctggttttgcattaatattaatatcgtacaaaatttgatgttctggaacatatgaaaagttaacgtggtcaaaaacaatatgtcccttaattggtacttttttaatatcaccattcttttctggaacatcccaataccagctattcttgacttccttattaggagacatgataacatcgccattatcaacttcagaaggctcatcttctagttcaaaaattctttgagcacctgctaaagccaaaacaattgaattcaattgttgggaaatttgtgcaatcggcatactaaactgacgtgataactgtaagaaagatgcaattgcacctaaagttaaaggagcccaaccattaattgcagcagctcctccaataaaggcaattaagacatacaataagttccccatattacccatgattgggaataaaattgtagcataggtattagcttttccagaagctccacgcaattcttcattaaacttatcaaagccttcttcagcttcaggttcgtgagagaaaactttaatgacctttaagccattaagcatttcttcgtcataaccattaatttgacctagtttattttgttgaactttgaagtaatgactagatctaactgttaaaaatctaacaattccaaaggataaagcaaaaataataaatgagaacaaagtcaattgccagcttaaactaaacatagctacaataacaaaaatcaagcttagtgccgagtttaagaattgaggtaatgattgggaaatcatctgcatcaaggtatcgatatcgttagtataccgactcatgatatccccatagttattttggtcaaaataagcaattggtaaagattccatatgggtaaatgtttcattacgaacccggaactggactttttgggctaatacccccatcaacatactaaataagtagttagaaaggaatccaattgcatagattccaaacattactaaaatggcgtttaaaagtggtccataattcggaactttttcatgtaagagtggtgttacgtaagtatcaatcagtcgctcaataaatagtgatccaattacagcagaagcagctgctaaaataatagtaattattgaaacaaccaacatccaagggctcgttgtcaaaactaattttaataaacgaccaaggacttttattcggtttcctttaggttgtgttttttcttttacttgatccataacttactctcacctactttcccgcattattttcttcttggaacttagcaattgaacgataaagttcattggttttcattaattcttcgtgggttccaattgattgaatcttaccgtgatccataacaataattcgatctgcatccttaatggaaacaactctttgagaaataataatcttactagtatgtggcatgtcttttgctaaggattcacgaatttcacgctcagttgtcgtatccacagcagaagttgaatcatcaagaattaaaatttctggattcttcaaaagtgcacgagcaatagtcaaacgttgtttttgtccaccagaaacattatttccgccttgttcaatcattgtattatagccatctggcatttcgcggataaagccatctgcatgagcaaccttagctgcagctacaacttcttcatgtgttgcattttcatttccccatttcaggttttcttcaacagttccactaaacaaaacattcttttgtaaaaccattgcaactttatcacgaagggccttcaattcgtatgatttaacattatgtcctgctactctaacagcaccagatgttacatcataaagccgaggaatcattgaaactaaagtcgatttagatgatccagtctcaccaataataccaattgtttcaccaggggtaatgtgtaggttaatatcctctaaagcataatgtttctcatctggtgagtatttgaagttaacatgatcaaaaacaatatctccattagttacgtccttaagaggttttcgtggattttcgattgctggcttttcggttaagaccgctgcaatacgtttaccactagcttcagaaataactaattgagtagtgatcatagctagaatattcaaactaaacaaaacagagtttgaatatgaaaacatagaaactaattgtccagtttgcaaacttccaccaacgatttccttagcaccaaaccagcaaatcgctaaagtagaaatgttaagaacagccattacaaccaacgcattaagcgacataattttctgcgctgttgagaataatttataaataaagccagaagacttctcaaacttttcaatttgagattcttcttgtacgtaagtctttacttcacgaattccacgaatattttcacgaacatcttggttcattacatcatatcctctaaaaatacgtgggaagtaaggatatgcacttttaataattaatgccaaaattaaaacaaagataggagcgattaccacaaaaatcaaagatagccttggactgataataatcgacatgataattgaaaaaatcagcattaatggtgcccgaacagcaattctaattaacatttgataggcattttgaatattggttacatctgtagtaagtcgtgttaccaaactggcactagaaaacttatcaatattgctaaaagaaaaatcttgaatatgataaaacatatcctttctcaaattagccgcaaaccctgctgctgcgtgtgcagaaacataactggcacttgcacctaaagctaaagaaattaaggttagtacgaaaagaattaggccccacttattgatatagcccatatttcctttcataattcccctatcaattagaataccaaccaagtacgggatcaacatttcaattaaagcttcacctgcaactaggactggggaagtcaacgacaattttttgtattgtctaattgacttacgcaacacattaaccatataaaacccccgttctttacttaaaaaagataaaaataaatagacgcctcgcgccgtctattcactcccttaacaaataaattatttgttatctttatttatactgtagactaatttaaataaatagtcacgtttttaatttcgacgattttgtcttctagcggcaatttcattttgacgcttaatttgtaatggatcaacaacatggtacttttgacggaaccatctgcgaacaaagaaagcaattaccgctaatacaatgtaaacccatgggtttaatacagggttaatcacccgcataaatggcattgatgtaaatgtaatccaaaccattatgattccgactaaaaatacacctattaaaataatttgccacattggtggacgtttacttttatccctagtaattaaatcattatagtatgccattaaaataccaaataaaattgtaactgatgcaacagttaaaatacccatttgttgcataccatcttgttgcttagaactgttgttaaatagttgaactacaccaaagaatccggcaaagataacaaagtacaataaaccattatctacggcatgcatccaaaacttagtcttaggtgcttcttttttaggattagcaatttcaattgctttttctcttggagctttttgatataagttagatgctggaattcctttacgttgcgcaacaataatttctggcaaaatttgatcaattgctggctcaacttgatccatagtatagttttgatcctctgtcaaaaacttctccaaacgaaaaatgtaatcttggtttttattacttaacttattacgcaattcttttggagacatctttttaatctcttcatcacgagaattttgttcatgcgccttctttaatttttcttgttgcgcattacctactgttgagttcttggcagcttcagtattttcacttttattttgatcttttggatccattaaaaaaactcctaaacattaaatctaaattcaataatatcaccgtcttgaactacgtagtcttttccttcaagacgaagctttccagcctctttaactttttgcatggtttcaagctcatttaaatcatcaaatgaaacaacttctgctcgaataaatccacgttcaaagtctgagtgaataacaccggcaacttgtggtgctttcatgccttcatggaaagtccatgcacgggtttcaggaccaccagcagtaaagaaagtacgtagacctaaaatgtggtaagcagccttaatcaaacgatcaagcccagattcttcaacgccttccatttcaagaaattcttttctttcatcttcatccattgaagcaatttcttcttcagtagcagcactaattcctaaagcctctgcattttcactttcagcatgctttttgacaatttggtagtacttatcgctttctggatcagccattgaactttcagcaatattagcaacataaataactggtttagaagtaagtaagaatagtcccttaacgatcttttgttcatcttcattaaagtcaattgagcgagcagctttaccttcttcaagaactggctttaatttatttaaaacagctaattcagctttagcttctttatcgccttgttgagcaaccttttgcacttttccaattctacggttaactgcatctaagtccgcaattgctaattcaagattaattgtgttgatatcttcttctggatcaaccttaccagtaactgaagtaatgttgtcatcatcaaaagctcttactacgtgaacaattgcatcagtttgacggatattttcaaggaatttatttccaagtccttcaccttttgatgcgccttttaccaaaccagcaatatcagtaaattcaaatgtagtatgaacaatcttcttagctggaattaattcttgaatacgagctagacgactatctggaacttcaaccatccccacatttggctcgattgtggcaaatggatagtttgccatttcggcaccagctttagtaatcgcgttaaacaaagtagacttaccaacatttggtaatccaacaatacctgcagttaatgacatattattctcctcttaattggttttattcaaagtgtggcacagcaatattttccttaggaacgtaatgttcctcttttaagttaacaggatcatttgctgagtgcagcactttttttaattttttattgaattctgctcggggcatcataattaaatgaccacaccctaagcacttaatgcgaatgtctgcacccattcgcaagatttcccacttattttcaccacatgcatgtggttttttcatctgtactacatcgcccaaatgatacatgaaaaatcactcctattaattatttatctaaattaattcctagtaaatctaaaattcgatttaattcatcagttgatgcaaaatcaatggccaaatgaccatttccttttttaccttcggtaatatttacactagtaccaaatttatcagttaattgtgattcactagccctaatgaaagctgattttttaatagcctttttcttgggtttcttttctttttcgtttaatttagctactaatgactctaattgacgaactgtaattccgttcttaactacctttctggccaagtcatcaatactatccttatccttcaaaccaagtaatgttcttgcttgccccattgatagctctcctctttgaaggagacgtttagttttttgaggcaaagtaaggagacgaagataattagcaatgtatgggcgagattttcctaatcttttagaaacttctgcttgagttaaccctaaattcttttgcagcatctcataagcttgcgcttcttctaatggtgttaagtcttcacgttgcaagttttctaaaactgcaacttccatcatttgtgcctcatcaaagtctcgaatgatggctggaattgttttcttcttagctaacttagaagcacgaaaacgacgttcaccggcaataatttcgtaaccattaactgatttacgaataataattggttgaaaaacaccattttctttaatggattcggaaagttcctttaagcttttgttatcaaacgtttttcttggttgatatggattaggtctaatttcgtctaaagagatttcagtaatctcctcagtttcttgaacttgtgggctctcatcaaataaagcttctaagcctcgtccaagaccacgttttttaggttctttagagttttttaccatgagctttcaacacctcttttgctagagaatcatatacttgggaaccgcgagattttggagcgtattctgtaattggtttaccataacttggagcctcagctaacttggtaattcgcggaataattgtcttataaacctttttattaaagtaagattgaacttctttaacaacttctgctcctagattagttctagcatccagcatggttagcaatacaccttccacacccaaattcttattaaagtgcttttggactaagcgaattgtattcaataactggcttaagccttccattgcataatattcactttgaactgggattaaaatcgaatctgaagcagtaaaagcattaattgaaagctgacctaaagatggaggacaatcgatcaaaataaagtcatattcatggctaacctcatcgattccctgcttcaatctcgtttcacgtgccatcattgatgttaattccatttcagcaccagctaattgaatagtagcaggaactgcatctaaatttttagtttctgtatgatgaatggtttcagataaaggaatttcatcaattaaaacattatagatatctttatctacagttgacttttcaatacctaaaccagaagttgcattaccttgggggtcaatatcaactattaaaactttataaccatgatttgcaatgctggcacctaaattaatcgtcgtcgttgttttaccaacgccacctttttggttagcaaccgaaataatttgaaccatatttactccctttgcctactttttaagcaattcaatagtaattttgtaggaatcaccctttttatcttccttgtatttcacggtcattcctgaatcttttgccatcttaattgcttttttaatcgtatttatttgtactttgaaatcattagctgtccgaacctgaacttttttcttaggctttttagtttgttccggcttattctcttcgagcgcttcttctttttccttttcttgagcagcaaaataaccatcaagatcttttaccatctcttcagtttcttttacagttaagccacttttaataatctcgctaacagcagtatcttgatcttcttcattcaaagctaaaagtgcacgtccatgacgttgagaaatctttttatcaattaagaacccttgcacttttggcgttaacttgagtagtctaatcttattagcaatgtaagattgagtcttccccatttgttctgccaattcagtttgagttaaattattaaccttcatcaattgaacgtaagcttgtgcttcatcaatagggttaagattttcacgttgcaaattttcaactaaggctaaagaggctgctttttcatcatccatatcttcaacaattgctggaatttttgcccatttaagtgattgagcagcacgaaaacgacgttcacccgcaataatttcatattctccttcgggaccatcagctggcttacgcaaaataattggttgaagtaagccttgttcttttagtgtagtagctaattcttcaattgattcatcactaaaagtatgacggggctgatagcgattaggcataattttatcgagctcaatttcttgaacttgcttactttcagggatctttttttgacgattgccaaataatgaaaatgccataaattattcctccaattaaatttaaagtggttttttattcggtgtaccagcttgacgcggatatttcttaggggtcgcttttattttttcaacaacaattaaagtgcggtcatcatctgtatcaggaagggttaattctttcacatcttctacttttcctcccaatacatcaatcgcatgcttagcttccgctaattcatcttgtgcctttggtccttttagagcaactaagtaaccaccaacctttgctagtggtaaacaatattcacttaaaacactcattcttgccactgcacgtccagttaccaaatcaaatttttcgcgtaaatctttattttgaccggcatcttccgcacgactatgaactaaagtaactttatctaaacctaagtcgtttacaagttcatctaaaaactttaatcttttacccaaagaatcaacaatagtgatacttaagttaggacacaaaatcttaattggtaaagaaggaaaacctgctcctgctccaacatcacataaagttttctcacctttaaataggtctggaaattctaaaagtggagtaatgctatcaaagaagtgctttaagtaaacctcatttttatcagtaattctggtaagattaacctttttattaaattcaactaatttatcataatacgtcgcaaattgttttttttgcttctcattaagttcaaagccatattttgcgagctcttttgcaaaaatttctggattcatttttcacctgtgaaacctagtttcacactcctaatttaccgcaattaaaggcggttaacaacactattatcatcataaactaacgtatttaattatgtagtattttttaagaatcgtcaaaaaacaactaagtatttaaaaatatgtatttaaattaaaatcgataagctataatgattagcaaaaggagttaaattcatgattgttacgcttattgtgattctttatctcggttatcaaacttataaaggatatcaactgggatttgctcaacgtgttattaatatgatttttggtgcaattgtatttgcagcagctattctaggccaaaacagcttgggaaattggttctatcaacaattttctggtaaggttgttcccacaacgggcaatattagtcttgaaataatcggttaccgtttcttagccttctttgtaatttggtttatcggtaaaatgattttaaagatttgtaagggctggcttcctaaacgtgatcgtactaaaaagggaatcggtaatctattagacaatgttttaggagcaatagtatcttttattgctgcttacttcttagtttatgtagccttatcaatgtgccaggcttttcaaaatccttggtttattcaacaaacagttgattcaccaattttacgagtaattatttataacacaccaggtttgtcaaatggagtatttaagacaatatttggtattagtcgaacagttggttaaaatactcagcaaaaataggattcggtaattccgaatcctattttttatacaccaattctttccattgaatcatcgtcatatacaaagattgcaccatagcgacctgctttatcatttttccagcctggaataggaccaccagcaaaaaatagtcgcttacactcaatttcagcttgaacagaatcacgagtaaataaggttacaccagccacatgagtcttaacgggatatccagttttaggatcaataatatggtgatattttttcccattaatttctaaaaagcgttcgtacgtcccactcgttacagcagaacattcatggacagtggcggttgttaaattattaccacgtttctttttcggatcttgcacgcccagaatccattccccacttgctcttttaggagaactgtttacaaataagacattcccacctagattaataattccagcacgaacatcataagcacgccataaatctctaattctatctgctatatatcctttagcaattccgcctagatccagctccatcccttttttagttaaaaaaacagtctgattatcatcatctaatctaacatctgctggattcgttagactcatcttctctttgatttgttcatcagatggaacatgggctcctttaaaaccaatatgccataattttacaactggtccaatcagagcattaaagccgaaattttgtttactttcataaacagctagcttaattagattatatgtacttgcagaaacttgtacgggatgaataccagctgcatgattaacgtccattacctcagaatggtctcgatttaccgttaatcgatcttcatatccggcaatcaaatcaaaactctgatccaaaatctttttattctggtcaccataaacctgcagcgtaataacagttcctaatccgcgcccaacttttgaaattggagttgaagcataattttctatcattttgatgccttctttggttctaagtataattctctcaaactttgaatcatctcatcatcaactttaagaacatttttaatgtaattatctattccatcatacttttcatcaattaataagagagctgtatccaaatattcatttgcgacactggctaagcttctaacgttagcacgcaaaatcacactaccaccctcatcaattatcttttgattcatcttagcctgataatttcctagcattaagttagaaaatagataatcttgtctgatagtttccatatcaacgcccaaaatatataggatcagaactgtagctaatcctgtacgatcttttccttcagagcaatgaaaaataatagctccatctttagtattagcaaagatgttaagtaaactattaaaggctttttgagaatattccttactaacagaagaatggtactggtgacacatcgtcttaaaaccagcatattgatctttagtataggtcttttttaattgcaatatcttttgatctgtttctgcactttgatttccatgaattggattatcaatatgttcaactcctgctggcacaacatcaggagctaattcaatttctttaggtgagcgtaaatcaacaattttagttaagccataattaattaaaaaagtttcatcttctttagtcatttggcataacttccctgttcttagaagtcgatgcatcttaatttttcgaccatcaaaacctacataaccgcccaaatcacgtgcatttggcacatgttgcagtggtaaaatgtttggcctaatcattttgtaatccctacttttctaaatttttaaaaataactttttgtcctggctcgatatgaggaagcaagctacactcttcatcgcagactcttccaagaacccttccatctttattaacaggtaaatttctcttagcaatatgaatttcgttactatttaaaccattgctattgatactaattgttcccacaggtcgatccaaaggtaaatccttcgcttcaaactctggaagctcgccttcactacggagtctaacgatatcttgagcaagatacaaataattatgccattgattttcattgaggaaagtatttttttcatctacatgaagcgtaattgcatgatccttcgtataacgcgcaaaagacttaatcgtctcactagttagacgatcgccaacaatgacgttattgcaggccaaatcttttaagttgagagctgctgctaatggatatacgcctctttgtgactcaagagtagtttctccagcaaaaaatggtcctcttttaaccccatctccagatataaaagctgctgtttctaaattacaattgtgaagccattgatttttttcttcaaaccacttttcatccatccctgtttctggctgggaataaaaatcaaatagggctctaatatgatcaaagttagctgcctcttcttttaaatgagtaatatcttctggttgtaagtaaattgcatttaaagatacccacatagttttagacaattttgatacaaaacgcattaatacttgatcgttaatccttaatccagtaacattaagcttctttatttcttctgcatccgctaaatcatagcctaaataatgtaaatcatcttgtgaaacgtctgccatgacctttaactctaaatctttacaccagctagttaactgatctaatctttttagtactatgtctgcttcatcttttaagccggttaatgaagtaaagacttccttaaaaccagcattcctcattccaagcaaataattatgatcatctgcagtcaaatctttatctaagtaaactgaaaaaccgagcatataaatctctcttttctaagctttgtgaaaatgctttctttcattaaaataataaactttaatgacaaaaaaagctagatagaaaattctacctagtttcttttgtactataggaaaataaggttttaacttatttttgagcttgttcaacaaatttaacaaaattattaaatgctaaatcaatagcatgaatagtctcttggtctaataagtctccagtattcttgtcaaacttatctgcagcatgaccaattaaaacttcattccctggcaaaacatttgcactttgatcaggagaaagcaaaatttcacgcatttcttcttgcgctcttgaagctccctgaattccgtaagatgtacctaaaaccattgctggtttcatcttcattacatctgcatttccttgagcatggcttcccgtccactccattgcactcttcaatgcagaaggaataccatggtcatattctggagtagcaaaaatcacaccatctgcttcacggatcttatttttgaattcttcaactttactatctggttgtgcctcttttttaaaacgaggtaaatcagcaatttcatatacttcaatttcagcctgatctttataccgcttagccataaattgatctaaaaaacgattatatgaaaaatctgcattcgtaccaacaattgctagtaatttcatgggtcgttcctcctacttacttacttcagcataaaaactatcaaattcatcaaagaaatgatctaaaaacttaacagttccagctggtaagtttccgttttcgtcaaattgttctggagctgttcccatcataaattcatcaccattaaagactttggcaccaaaaccaggagaggaaagcaccagctttaaatgactttggccacgagctgatccttgtggtaaaactgaagtacccacaataactaccggcttatctttaaaagggtgttcagctgatgaaagccattctagtgcactctttaaggatgaaggaactgagtgttgttgttctggcgtagagattaacactgcatctgcatcagctacctttttagcaaagctagctactgcagcaggttctttaactccttctttaaacattggaagatctttaacctctcccaattcaatatcatatctatcagtaaaatgctttttaataaaatttagtagatcgcgattataagaatgatcggcgttgctacctacaatggcaaagagtttcatttctacgtcacctttcttttaattatctttctattaaattatactttttaatctcactattttaaaagccataatttaattttaacaaaaaagcaccactttcagttgaacgtggtgcttaattaacctatgaaactagcctagacgttcttcaagagaagcgtcactatcagcagcaaatagtggattttcttcaacgttagtaagacggtcatttaacattgcttcatgaatttgtgcctttaaaacactaatcatttgagcttgtgtaaagtttgccatcttgttaatgagaagagttgctaaacctgtagcagcaatccagttagaaatcacaatatgattgagtctttcttcagaaaattgttctgcgtcaaattgttgcttgaatttttcaagtccaagtcccattaaagtatcaacaatcatttgatttccaaatttacagtctacaaacattgctctaaacaaatcaacatgttctttagcaaagtacaagtatgaaagatctaaatcgatcaaaggttcacctgtaaagttctgttgaagagtgttagacttcaattcatcagaaattcttgctaaaacttgattacgtaaatcttgcatgttttcaaattcaagataaattggttgagttgagcagttaactgctttagcaatatttcttgcagttaaactttcaattccaccacgaactgctaatttataagcagcatccaggattctttgcttatctatttctttttttctagccactttaattacctcacttaattcatattcatcaacatcaacacattgtgatcatctaaaaaacaacataaatgcctaacgtctgttattttcttcgtcattatattataacaaaaatatgaaaatttggagaattttgtgcaaatttctataatcttttaaacaaacttgaatcatcatcaccagtaaattggtcataatgagaattaatcatttcaataacttgttgtttatctagcccttcatttgcagcaaatgctaaaaatgcagctgaaagaatgtatcctttttcacgattatcaactaaattatcagaaaattccatattaatggtattatctttgtaatcagttgtaagaataatttttttatcttctggtaagtctgccattttaatgccctcacttatttttaagttttatacgttacaatatagattatattatatcaatagaaagtgtgaaacctatgacttctcctgttggacgttcatcttgtacatctattttaatcggtaaaaacgctactgtagatggtagtgttattatcggccgaaatgaagatgctaagactgcttggcctaagcatcttgcttttaattcacatcaaacaattaaaaataaaatttttaagtcaaaagataataagtttcagatggaattacctaacgaacgtttttcttactcttctactcctgaatggacagataaatatggagtatttgaagaagatggaatcaatgaatatcacgttgcaatgagcgctactgaaagtgcctatgctaatgatcgtgtaatggctatggatccttttgacgaagaaaaaggtatcttagaagaagcaatggtaacagttgttttaccatatattaaatctgctcgagaaggtgtagaacgtttaggtaagatcgttcaaaagcacggtgcggcagaagcggatgggattttattcgcagatagagatgaagcgtggtatatggaaattggttcgggccaccattatgttgctcaacgcatccctgacgattcatacgcagtagttgctaatcaactagccattcaagtcattgattttaatgataaagacaattttataacttctcctggaattcaagaatttgtttatcaaaataatctttggcaaaaaaataaaccatttaatttcagattaatttttggtacacatgatgattcggatttaacttataatactccacgtgtttggagtggccaaaagcttctaacaccttccgtaaatcaagatccagaaagttttgatttaccatttattagaaagcctgatcatcctgtatctattcaagacgctcaacgcgttttaagcgatcactttaatgggacacagtatgacctaactaattctaaaaacgaaggtcaacctgcctatcgtccaattgccgtagctactacccaggagtcccacctcctccaacttcgaggagaaaatatgactcattggctagcaatgggaattgctgcacaaagtgtctacattcctttttacccacaaggaactaaagtaccaactatgttcaaatacggtaaagaagaattttcaacaaattcagcttactgggtatttaaaatggctagcgtcttagtagatcgaaattggaataaatatgcaactagtttagttaatacgcaaaaagcaacgaatctagctttgaataaactgcgagctgaatatgataagaaattggctcaagaaaaagatgaagctaaaaaagtagagctcataaacgaagctaataaaaaactaactgatgttgctattaagaactatcaaaaattaaatgccaaattgattactgctcagaccgcagattcaccacttcggtttaagattgatcctaatttgtagaattgaagcattactaaatgaaaagaattcaagtacctgctacaggcacctgaattcttttttatttgtctaaaaaatctttgggaattttatttttaaaagataaaagtttctgataccaaaaatatgaatctttcaagtatcgtttataagttccatctccaaaatcatctaaatcaacatatattaaaccgtatcgcttagaaatttgtgttgtcgatgctgataccatatcagtcattccccacatacaatagcccataagctctattccatcgttttgtatagagactaacatctgtttaatatgttgtcgtaaataatcaattctataatcatcgtgaatttttccacttgtagtcagactatccttagcacctaatccattttcaacaataaataggggcttttgatatctatcgtataaattaattaatataatccttagaccaataggatcaatttgccatccccaatcgctggtaggtaaatatttgttataaaccccttccatacgatttgcttttgttacttttaatccttttgtatcaaaagcagtgcaaacagaagagtaatatgaaaatgcaataaaatctgctgtattttcactaattaagtctaagtcttcctttgatattttaatatgtaaattctttaattttggcactaaatttagaggatatttaccacgaatttgaatatcactaaaattatagctttctcgcattaactgaacgctcttaaggctgttgcgtggatcactattataaggatagatcattgtacttgtaatcattgaacctacctgtatatcagaataagtttcatgaatgtattttgttattgcagcagctgctacaaactgattgtgcattgcttgatagatgaccttttcaaaattttcatttagaaagcgatctcttattaatccagctgaagaaaatggatgacgcaaaatactatctatttcattaatcggaatccaatatttaactttgccgtgaaaacgatctatcacaatttttgcaaactttataaaaaactctctaacgcgcaaatcataccaagcatcgtagtttaatactaaatttaagggcatctcataatgagatagagtaactattggttcaatattatatctatgtagctcatcaaataacttatcataaaattctagtcccttttcattaggcttaatatcatcaccatttggaaaaattctactccatgcaatagaagttctaaaagtattaattcccgtagccgctaatttttttatatcctcaggatattgatgataaaaatctactccatgcctttttccccaacgtttactatctttatctgccatagcacgtttaatttcagaacttgtcatactatttgctgacttatagcctgctctcgctttttcaggatcatagcgttcgcaatcagcaattgaaattcctttaccatcttcattccaagctccttctatctgattagcagccgttgcgacaccccacttaaatccttcaggcacgtgatagtatttcataattatctcctaagctaatacaataacattactattcgttgtaacatccttttcctcatcttttttggttacaactggcaatacttctaagaaatctttgctgtttaacacaatcatcattactgttggatcatatccagctttttttatcttatctatgtcaaaatcaaccaattcttgaccagctttcacatgatccccttttttaactaattgtttaaatccatcaccattcatctgaactgtatcaatccctatatgaatcaatacatctgcatcattatctaaatgaagaccaatagcatgtcctgtatcaaaagtagctgtaaccaccccatcatcaggagcgtaaattttaccttcactaggaataacagcaattccttttcccattactccacttgcaaatgtttcatcctttacctcactaagaggctctacctttccatttacaggactctttaaatcatgtttttcatgtacttgatcaaacttagttttttgattattttcatctactggatcatcaaacccaatcatccacgtagcaataaatgtagcaacactagcaacaataattacaataatagcttgaataacaaaattttcagttttagaaacccacattggcaagcttaaaaaggcaggtgtgacataaataaatgccttaattttcataaaacttgcaactacacctgcaattgcaccaccaatcattgctccatacataggtttctttaatggtaaattaacaccaaacagagcaggttcagtaattccacctaagtatgcagttgcactagatgaaagtgctaaactctttagtttcttgtttttactctttaaaccaactgctagtgaagcagctgcttgtgacatatttgaacataatgcaactacacgaataattggatcaaaaccttgtgtagcaactaattgaatactaattgggcttaaagctttgtgaatcccaatagatacaaaccaaggatatgctgcagccaaaattggaatagcaacaattcctgcattgtggaatagccacatagatataaatccaataccttcagagatcatattagagattggcccaataactaggaaaattaaaggtgcagttataagcattgttaacattggaaccataaaaattttcaccatatttggtgtatatttctttacatacttataaatataggacatgatccaaactgaaataattgcagtgattaaagtagaagaatatttaattagctgtactggcatcccaagaaactctactggctttttagctgcaaccattgctgtccaaatgggatgttcagttactaatcccataaaagcacctaaatattgatcagtattaaaaaccttagcggctgaaaatccaataaacgctggcataaagaaatagccggtatcaaaaattaaatttaatatttgataagtttggcttttatctgacaacaaaccgctaattgtcaaaatcaaaagcaaaacttttcccattccggctccagcaagtaatgggatagcaggagcaattgatccagtaatcacactaattacagtatcaaaaatattcttcttttctttaggtgttgacttataactatcatcattttcgatgttaatcatcttaactaaatcgttataaacatcttcaactgtactaccaataactaattgatattgtcctgctttttttactacttgcaatactccaggaattcgtgcagctgccgcatcatctgctttactttcatcttttagaacaaatcttagtcttgtcgcacagtgaacaacagactgaatattatcttctcctccaacagcagctataatctgcttattcatattttcatagctcatttttcttctccactcacaattttattaatgtgtattgctaaatacataatctcttcattgtttagttcataattatatttttctaaaatatattccttaatcttcaaagcacatttatatgcttcaatatcgctattttttattacatttaaaatttcttggctcaaatctccaaaactagattgatcctttttatacatcatagctttccaaaagaatttcaagtggaccgcaaagcggttatagttcaaagattggtaatcaatattaatgtgaaaataatatctaacaattttagtaattgatttgataaaatctactgatttactaaaatcactaatatcatttcctagctccccactaatgatatgtactgcaataaatccagcttcgtcttctggaaaactcaaatcaaattgagcgtctaacaactttaaagcccataaaccatattgatattcttttggataataattttttacttcccaaataaatttattgtttaaatacaatcccttcttcgctctttctacacttgtagctaagtgatctgtcaaagttatatatacgctatcagccagttcaatactttcttcaaatttcaatctatcaacaattttttgtgcaatttgaaagaaaataggatctgtttcatgaattgtttctaatagcagttttctttgattgtcagacaagggtgtgaaaattttatatattttttgtttatcaaactcatcccccgctttttttccataagcaattcctttaccaagtgcaattatctcctcatgctcttggttttcaataataacagcactattatttaaaactcttattattttcatcgtgcctccttaaacatacaaaaaagcccacttatcccttcttaaactagagacaagtgggttttgtgcaaaatattgttacaatctcactttattcacttttcaactatatgatatcgctttctttattattattcaatacttaattaccttttttcaagctcaaacgtccatctaacatttcataaatcttatctgaatacttattcagtcttaaatcatgggtaactagaataatagccttttctttttgtttagctaaagtcttaaatagttttcctacttcttcaaccttttcactatctaatgaagcagtaggttcatcagctaaaataatggctggatcggcatataatgctctcgcaattgccactctttgctgctgcccacctgacaattccttaggatatttatttaccagttgagaaattcctaattcatctagcaatccatcaagcgcttctttacttagattgccggtctttttaaccttatctactaagatgaactgttcccgaacagtcaaataaggaactaaattataagcctgtaagacaaagccaattttatctagacgtaatgcatcagcttgtttaggagaatagttagttacgttatctcctccaataaatacttcaccagaagtaggcttttgcagtgctcctgcaattgttagaaaagtactcttgcccgctccagaaggtccttcaattaagacaacctcacctttttgagcttcaaaatttatattttttagagcattaaccttggcctctccttgaccataggatttacttacatcttttaattcaattactgacatataaatttcctcccttacacagcttttgaagggtcaaccttaagaattgatcgaattggaattaatccacctattactcccattacaatcatcccggcaaaggttgaaatcatgatccatggggcaaaatcgattggtacagtagctggcattacgctaacagtaagcagcattaaaagatatgctaagaccgtacccaaaattactaaaattaatgattgactaagagtagcaccaattaaagtcttgcttgggataccttgtgctcttaaaacagcataatttggcattttttgaatagttaaaatgtataaaaatactgcaatcacaatcaacgaaattacgaatagaaaaccaatcattaattcaaaagttgagttttgggctgtataaccaggtaatttattaacaaaagtctgcttatcataagatctaacattcttagctttaaaatctaagttcttcttagagataattccagaagcttcaacattcggagccattggtcttaacttcttccaggttgccatcgtaccataagcaattggcgcaatattaatcttggcattttttaagaaaccaacaattttatacttttgatcgctaccatttagggttactttatcgcctaagcggtaacctctattccaaagaatttgatcaacagctatttcgtcattgtgctttgctttacgaccagaaactacttctagatttttatagatatattcatctttattcaatccaataaattgagctgaaactgtttgatgtttcttttctttcattacaattggaactatcccgatatagctatcattctttgtctttttaaaatcttttagattttctttggttagcagagactgacttaaacttacattcgaattgtcattcaaaacaaccgattgagtttgccagctattaactgcttgtgtattttctgaagctagacctactgacaatgatgacagcataaaaattaaatatgcgattaaaaaaatcatcaatgtaattaagccgtaacgcagcttctcgtattttatttcttttagagctaaaaacatttttgcctacttcctttgtaataaacataaactttcatggtatctttttagaattttttctttattctttttatcaaatagggctaaatctattgcctcatgagttaaaaccatggcagcccagacttgagagtcgagattaagaaaagcatccttctgctttttatcatctccaagaaaagcttgattctgactaagatgtagtttgattagatcaaaatagatactattctcagtctgattaataaaatcaactgtcatcttataaaaagcttcagggtcaaactctctcaaccttgctggaggtcccatatggacgtctttcatcgcaagactatagagataaatatatgaatctttcaaatcaccaaaatacttataaaatgctcctctagcaatccccggatcctttacaatgcgtgcaacttgcgctttagctaagggataagtactaaattcttttaaaagcgctccttcaatcttttgtttcttttcatccgaaagatttataaaagtttcactaaccatgccttccctccttgtgacactgtgtcactttcgatgtgtcttaagtctattcctaaagtgacaccgtgtcaacatatagatataaaaaatgcttaatttcgataaaatatcaaaatcaagccttaaaattattatgctaagacgcggttatagtaaaccaaagttccatattctttattaatgtctaattcagctagaccgcaattctgcatttggtcaaaatacttaatatcgccattagttaaaaaatgagcacaaatcatccgacttactacaccatgacaaactaccaaaactgtatcattagcatgttctttatataaatcgtcaaaaaatgcagcaattctttttctaaaatcttcacgcttttctacatctgaagcatacttataaatattatcgttaattagtcctttgctattaaaagcatctggatgctttttacgatattctaaagaagattttccatcccaagaaccataacttagttcttcaattcgcttatcggttattattggggtcttatcccccacaaaaatccttgcagtttgctgcgctctctttaatggacttgcatatactgcatcaaattgactaggatcaaaattcttagcagctttttctgcgtaagcgcgcccttctttacttaaatcaggatcaacatttgatccttgaatcattccttgcttatttaattcagtagttccatgacgtaaaattactactcgcataacatatcacctcttaattccgtaatacaagggttccgtccgattaaaggtcattaatcttggtcgctcaatatcatttttttcaaaatgaagctcagtaaaactaacatttcttactgtcattacatcttcaatttttagtttaaaccaccgagctattaaactcctaatcacaaatccgtgacaaacaatcataattgtcttgtcattagcatcgggttgaatctcagataaaaattcttcaactcgatctgctacttgactaaaagtttcaccattttcagcgtattctgcatatttactattaatagttcctaaatcatcgaaggcatcaggatattttatcttcagctcttcggcatgttggccgtcccaagagccaaaattcatttctctaagtcgatcatcagtaataatctctttttgaaaatcagttaaaatttgtgctgttcttttagctctaattaatgggcttgcatatactcgatcaagtttactattgtcaattaacttacttacttcttctacttgtttaacacccgcttggcttaagttagggttactagtaccgccggagatcacatctgaagtattatgttcactaaccccatgtcttactaataacagatccatttcatcacaatcctttatattttatccaagaaaatattatactaaaaatttattaagctactaaattatctcacatgtcagactataataaagttagacaaaaagaaagtaggcattaatatggcaacaattacacttgagcgtgatggattacaattagttggaactcgggaagaacctttcggagaaatatatgacatggcaatcatttttcatggttttaccgctaaccgtaatacttctttgctaaaagaaattgctaacagtcttcgtgatgaaaatattgctagtgttcgctttgattttaatggccatggtgattcagatggtaaatttgaaaatatgactgttttaaatgaaattgaagatgcaaatgccattttaaattacgttaaaacagatccgcatgtacgtaatatttatctagtcggccattctcaaggtggtgtcgttgcttcaatgttagctgggctttatcctgatctgataaaaaaggtagtactgctagcaccagctgccactttaaaaagtgatgctcttgaaggtaatacacaaggagttacctataatccagaccatatcccagaccgccttccttttaaagatttaaccctaggcggattttatttacgcattgctcaacaattgcctatttatgaagtatctgctcaatttactaaacctgtctgtttaatccacggtacagatgataccgttgtttcccctaatgcctcaaagaaatacgatcaaatttatcaaaacagcactttacacttaatcgaaggtgcagaccattgttttagtgatagctatcaaaaaaatgctgttaatttaacaacagattttttacagaataataatgcgttttaatttatatagaaaaagagaaatcgtctgatttctctttttttctacaatttcttaaatatataattttcctttgtggaatctgctgctgaaaaaacatagccaaaatcagaaaattcttttaaatcttccggtctattaattccttctttggccgcaaagcgaaccatctctcctcgcgccatcttagcatgtgtagcactttgtctccattttccgtttttattttccaaaaacttaattgtaatcattttttgactatcctttaaatatggagaaatcaaacgcgaatattctaaagacgctaagttaataactgtatctgtatcggcaaaaagctcttgatacggaagatctttccaaaagttatagagactgtagtatttaaagccagtcatttgagtttttaattccaaacgatagggaattatcccatcaaaaggtctcaaaataccgtaaaagcctgacaaaatacgcaaatgatcttgaagatagtctaatccttcttgcggtaaaacatccccagctaaatactgatattgaattcctgaaaaagctaaaagtgctggggttaagttagaatcaagttcacttgttacaagattatgttgatttgtacgaacaatgttatcattcgccttccataagtcttgtaactggttaaaacttcttgtttttaaaaagtctaatagctcctgagtcttatctaaaaaagcaggctctgatttaaccaaaaaagtatcttgatcaactctcatctttttagctggagcaataattatttttatattattatctgacattggcaaccacgataaataaagcaatcaagctaataactgccaaagcagcagaagcaattagctctatctttctttttttcttatcctgcaagctagcggtaatatatctagcactagcagccacactaataaacaagaacataataaatagccataaaaataggccaataatattagggagtgcccagtaaatttgtaaagaaactagcactgctaaaacaagcgtactgataattaagccacggagaaaattaacattttcatgtttatgataatgaagcacagtttggtaaccaaaataaacaatgaaaccaatggtaatatataaaataatattaaaaataatcattttttgtcccttctatagtcctccctaattatacgtgaaaccattttgctttgcttaaaatttcttttccacttataatcaatcttgaatatgacatagaaagcgaatagtaaaatgagtgaaaaagaagatttaaatattggacttgtattgcagtatcaagttgctccaaaaggtgtaattgatgccgatgctcttgtacgtcatgcacgagactgcggctttagaggcgtaagtatcaaagacgctaatgatgaacaaatggcagacctgcaagcagcttgtcaaaaatatacaattaaattttgtcaaaaaagaccagcagaaaaattaatttctcctgatgttctagcaaaattaatcgctgctagattagacgatatgaatatctatttcgaagttgaattaaacgccgatggatcaattaaagccgaatcagatcctgcaatgaaaactttgcgtaattggattagtcgctttggacatgcttactatgaaagtcgggctgaccatgagataaaggcagatgaagacaatgttcatgtcttttataatgccattgctaaatatcaacgctatgttttcatccatattccacttgaagaaagtatcgaattaaagcatgttcctcacgttgaagaggcagcttggattgacactagaaatgaagtggagttcgaacaagatggagaccatttacgtattaaacttaaccgccaagaagacggtgaagaattttctgtctacggcttgcgtctacagctccaccgcccagaagatgatttaggtaaaactgaatattaaaaacaaagaagatatcaaagtaacttttgctaagatatcttctttttatatattatttattatctttttaccgattaattgaacgtgccatccgggaaattgtatgattcatcccacgaattgtcttacttaattcgaaaatagtatccgttggtggcactactccccaacctgcatctccaatatgttggatatcaataccgcaaattttattttgtaaggcaatatcatggactgtttgagctccagaactttcttgactagttccaatcgtgctcattactagtccaccatgtttatgaacaatttttactatattaattaattcttcactagtaaaacctggaactgttccaacagcaggaaccaaaataacgtctgcacctgcatccaaaaactctttaactgattcttcactggctactggttcatccacgccagctccatgcatttttccagcaataattaaacctgaaaaatttttcttagctgtttttacagctttagcgatcattctattagttacaccagtcccaggatttccagtaaaacaaacgaaattgaatcctaactcttcagctgctctcattgattcaacatttgcagttctaccagaagaaatctgcaatttagttgattccatctctgctttctcatcaactggctccaagtttactccaattgggcgtccagttaatttttgaagttttttaaccgtattttctggtttatccacttccaagccgcttactttaggatttaaggtatcaaatagatttaataaaattaagtctgctccaaaagcggccgcaatttctgaagtagttagattatcaattgctggctcagtaaccacattttcacttaaaacagttcgaccttcactagccttgatactttgttttaattgagtaccgtccatttttaaaatttcgctagtatttgcactaattattctcgtaaccatatttctaaccctttctactttcttcaacaatttgccgtttatttagagcactcataaatggtaagtaaatcaaaatatcaacaatgatattaaacagctgcaagattgagccggcaatactattagttgccaaaaatcctgaaataagcggcggcattgtccatggaataaccgttccgttacatagtggcacccagcccaatttcattgctgtataagtagtaatagcattaaacataggtgcaataataaacggaataattaagcttaggttcaaaactactggcaaaccaaacatagtaggctcattaatattaaaaattcctggaacaatagttaatggagccaaaatttcattttgtttacttgcacgttttttccaaactaaataacccacacataaaactaatcctaaagtagcacctgctccgcccatatatacaaaattatcgataaatggctgagtaataatattaccaccatgggctaaatctaatttccctgattgattcagcactctattagcatcggtttgcattaaccagattggagacatagccgtattgactacgtttcctccatgaataccgacaaaccagaataaacttaccaaaataattgatgctaaagttcccagtaaggtattacctaataatcctaatggcttggctagaatattcatgattacatcatgtaagttaccccagtgggcccatgaaaatagccagtagatacatcctgctaaaaagatacaaactgtacctggaattaaggcagagaagctctttgcgactgcaggtggaactgtatcaggcattttaatctgaatattatgattaataaaccattgaaaaatccaagcgctaagtaaacctaaaaagattgctacaaacaatccacggcttccaagataaacatatggaaagccttcagcaggagtctttcctccactcataatacttggtgtcacaataaagaaaactgacgctgagataatcccagcagaaacgccatccgttttatattgattagcatagctccatgcaattccaaaagctgcaattaatcccataattccgaaagatccattgcttactttaaccagaatctgtgacaaactcactccatgaacagcagttttagttaaaaagttggtccatgcggtgattggaaaaccattaataaccataaataatgaacctacaatgatcagtggcatagccattgcaattccatcacgaatggcaatcaatggcttaaaggcaccaatttttgctgcaataggcattatatttttgtttacccatgcgttgactgcatttgatctatcactcatctttataatcccccttttattaatagtttttaactattctttaataattggtatatacctattttatcatgaagcgctttctttatcaaaatataagcattttcttctatgtaaaaaagcatcccagtaagggatgctttacacttaattatttattatcatcaggcaatattaaaataaagtttaatagcttattagcgtaactacgattatcttcaaaatctttaactgtctcatttaattcagctagtcgatcggtgataattccattgacattgtcatacatcatcttcatcatcatttgtggactattaactgtccaagcatacaccagcttattctgaagttgagcctgccatataaaatcattgtttagagtagaatattccattgaatacccatctgcaacactttggggataagtaaaattatagggctggatatacaagacaaatagcttagggttaatttgatgtaatccttcaataacacgataatctaatgactgaacttgatatttacgcttaataattagcttgccatatttttgattaaaattctggagcatttttggagaatcattaggcgttgtcttaacttcgattaataatttttgatttaatttcttagcagcttttaggtattgatcaaaactggcgattttagcttggtgcccatcttcatgaagcgtaattctggtcaactgctttaaagttaaatcttttggagttttattaataccagctaactctttcagattttcgtcatgcataactacaaactgattatcttttgtttcatgcaagtctatttccacataatctggatgaagttttgctgtcttttctagagctgggatagtattttgaactccatttttatcacttactcctctgtgtgaaatagtgactgggcgctgcatatctgctccctttaaatacaaggcactattgattcctgcagctaatacaaaaacgattattaagcaggaatctactattttaattgtctttttactttttacttttttctgatcttcccacttaaaactatttaacggtgtgacgacaattaaaatagaaataacactaatccaaatcgccattaattcactaattacttggaccagtaacagattaaagatagcaaaactaaagctaagcttttctggcaaatgatctaatcccaattgacagaaataaattattaaattgcagctaactaaaattacgctcacacagattcctgcaactaataagctacttaagagggtccaccaatttttgtggctagttaacttccagctttctttcatcgcaatccatgtctttttttcttgataaatcatcaagggaagcgtcagaatcaatctgataccaaaaataaaagctagcaaataaaaaattatcaatccactaaccagccaaatatttctagtcataaaatccaaaataaattctggaatttgaactttggctaataacggcgttcgataaaccatatctgcaaaaggtacaattaataagaaatataggcctagtaataagatggaccctactcgaacggaacgatatgtctgccataattctttaaatagtaatttaagggaaaattgattctgagaaatttctctaattcccaataatattaaggcaaatacaccataaattactaaaagcaggataactaattccacgattagtaggagagcaactccagtatgcgtggtaataatggtaacaatgttttgatatgaaacaaacggaattgcactagcttttaaaattccagttgttacatacctgaataacggaatgattagcatctgcgtaaaaatatctattccgataaacaaagcgacatactctagccaatgtattctaaaatttttagaatacatatctatttttcgaaaaatatttttcaaaaattgttcctccgctcactattttctacccttgcaatttagtttataaaaaataggaatccttatctattcttaggattcctatttttcaaagtcagcacttttcacatgtgaaaaaatcaacttacttaattcttggaagaataatctatcccctatatttcttccctcataactgctcaaaaccgtgcaaaatactggtgctttttttgtcataaaagcacaaacctcatggcatgcctgacgatctcggcccaatttattgtaggtaagaagattctccccataaaaagttaaatctgttggaatagtatgattactcaatcctttacgcactaaagcacagaagagattctgagtagtcattaaatgtgtaatcaacttatcaacactagcagctgtacattcgttatcttgatcgttagccgaatagcgcattaactctcttcccaatcggatgccgggataattctgttttaaccactcatcaatttcataaatatcaaatttctcaattaatagattagtagctacattatctgatagtgcactagttaaataaactaggtctcgaacgctccaattagtacgacgtaaatcaccaataataccagcgccacgcacacgagaaagatcagtaacttccattttttcatccacaacttcaggggtctttttccactgatcttcaatatatgcagcaatagctaagtcaatcaaacttcctgctggaaaaattttctcagcttgatgttgatacataatttgatcgccatacttaacaattacacctgcatcaatatcatacttttggataatgtcagtaattctaccctttaacataaagcaatcgcctttcttattagaattagacaaaacttaacttacgttatcttatatattatatcagtatcttttattataaagttattttaaaactttttattatcctatatcaagatagcttttaatttcaaaagaaaaagatgcttaagtgcatcttttctagtaggttacgttctttatttaattcattattagaatactactcatctaatttctttaattgattagttactagttctgtttctttaaacttttcttctaatctaggtaaatcttgattaatcgttgctaaaaataagacacttgagacaaatacttcagaaaaaagtgaatttatcgcacctactctaagcagcttttcatctgttgatacacctaaaactacatcactgacttcaaccaagggagactgatgagaacgagtcaccgcaataatcggagtatgattcttacgtgcttgttcagcaagtaataatatttcttgagtcaggccactataagagaaaataaccaaaacatctgtcgaatgggaataacaaattctctctaaggcaatatgaatatcttgattaaaaatgacatttttatcactacgaataaatttatagtaaagatcttgagcaggtaagctggaggcaccaacaccggctaaatagattcgatcagcatttttcaaaaaattgatcgcttgatttaaggccattccatcaatcaaatgagctgttttttcagtattatgttcaatacttgacagaagtttttgtaaaacgatatgtggattatcatgattatccacaatcggttcaattgtattttcactttcttgtggtgtatcttgagcaagttgaatttgaaaatcctttaagcccttaaaccccaattgttgacaaaaacgaatcatcgaagcagcactagttttagtaatttttcccaagccttgtgcatcttcttgtaaaaaagtctttggatgagccaataaataatcggcaatctttttagatgctcccttaaaattaggataattgtttaaaactttagtagataaatccataacgtacctctatttctattcaacattctaaggtactgaaatattatttcaagatttttgtacaaaatttaataatctcttcgcttcttttctcaaggtgttattatcattacactcagataatttatatcctacaaaataaggcggcgcataaaaacgtgggataattttacaacagattccgtctttattgggatagaaaaataggttatatgaatcacattttcccccatacatctcttctaaagtataacggatagcgtattgaatccaatccgcccaaagatttaagccgtttttatctattaaattaacatttaattcttgaaagccttgaactggatgtgtcgcgaaattaacttccatattatttgtcttaaaaacagtaattccagtaaaattattttcatgaatatatttatagccatcttctttatacaaaccaacaatttgcatatgtggatgagacagtgatccattagacttaggtccaaaatttttataccaaagaactgatctgaattctctgtttttcctcatcttgtcgaaacattcaagagcaaacttcattaagcggcgattatattcttgtgaatatgtagcaacatccccatgatgttcatctgattcaattaatactgtttgttttgtatcttttaaagttggaaaacgattagccagccagatcattggaccattggtttgataaatatcccttaaattttccacatcacaaaaaggacaggtagtatccttactaccattaaaactggatggtttatctttagctatcgcaaattcaaatataagtggatcgttattcaaatttattcctcatctctgaaaaaaacatttgcacttcagctcacactctactataataatctatgaaggcggttaaagcgctttcatataacattttgtagctttccttaactttactctttcggtcacttttccgaaagagtttttttatctaaaaaagtaccacttggacttccttagattttgcatcttcaattaaaccttttactctatcagaaacgtgcccttgctcgatatcaacagcatatcctaatttaaaatcaattacgatttttactaagtttaaatatgcatcttcactatctaattcagttttgccgccgaatttttggctacgaaatgtaattaaaataggaatagtccccatcacatttttcacttttcctgccacttcaagtaacctgttcattaaaactacgtctttaaaataatcaattctccactccatcatctcaggttggagtttttttatttcctctgcttgctttaaaatatctttttcacttacaccagtattaatgggcattaaaatcatttgcttgttaatttctacttttctttgatcaaaactcatcttttttctccaaataaaaaattgctacctaaattatagtagcaattttatcttcattcattaaaatttatctcgtttaatgctgcgaataatagcaattacaaatactagaatactacatcccatgccaaaataggccatatagccaacactaaacatttgaccaatctgtgctggattaatttggtgattaatggcaaattgatatgcccatcgattaatcatagttggcgtcaaaacaaataaaactgttgaaatacctgaccccactagcatagctcgacgtgaatacggttctctaaagaattgtgccaaaacacaaatagcaggggctaccattaaaaggaaggtccaaatcataatccatctacctgccggatcattcataaattgaccactatttgtcgcatagcggtaggtcccccacaaactaccgcctaataagctatccagtaatccaactacatttgctccttgagccgcataaacattattggtgctagcagccgcaccttggagcatttttaacatatcttgtgagccagtagtttgaaaattaatagtaacaacttgtcgcatataagtggacaaaaacatgatcattgaagctcctaactgcaatgctttaagtaaatgaagtgtcttattcccacctaatttaaattccaaactaagagttctgtcaggatttttactttttacaatgataaatgctccagcaattgcagcaattattaaaattactagaccaagccaccacttggtcataataaatagaattgctagcacaattaaagctactgaaatgtatggccgatttaagaataagtcccaaacgtttactttaccatggcttgctagtcgctttcgatactcttctctagttaaaacttttttcttatctttagaatcttccatcttattcactattctctacctttaccttattgtgctaatcaatattagcatgttagaagactatccgcattacttttttaagaaaattaaacaagttaataagatgaaaataattacttttaaaacactgtgctaaaataatcctattataaattaaaaagtaatttagaattgagatgactaggtgaataaatcacaagccagcactttaccaaatggttggcataaaactttttatactctatggctcggttgttttattacaggattaggttattcaatgacaatgccatttatttctttatttatggctgaactaggtcattataataaactacaattaaacctttactcagggttagcatttgccatgacttttattgcccaggccattatttccccttactggggtaatttagccgatcgtaaaggtagaaaattaatgtgcatgcgtgctgctggcgttatgagtttaacgatctttattacaggcctagctcaaagtgcactttttattatctgtatgcgtttcttacaaggcttatttcaggctatattaataacgcaacggcgctcatggcaggtgagacaccgcaccagcgtagtggctgggtaatgagtcaaatgatgactgcaggaactgcgggtaacttagtgggacctctaattggtggtgccttatcaagcgccttcggttatcgcatccccttctttattactggcggactaatgtttttaactttcttaggaacatggttattagtaaaagaagacttcacgccagtttcccgagaaaagatgaaaccaatgggacaaatactgcaagacttacctaatgttaaattaattatcattatgtttgtgacgacaatgattgttcaatcttcaactatgtctatcgatcccattgtctctctttatgttaaatctttaatgccgcacagtaataatattgccctaatcgccgggattgttgcggctacacccggtcttggtacaatgctctctgcatcacatattggtcacttaatggatcgtgttggtgctgaaaaagttttgcgatggggattattaattgctactattttatttattccaatgacttttattcctaatgcctggtcattagctttctggcgtttcttattaggaattatcagtgctggcttactgccagctgctcaaacaattcttactttgaatgttccaccagaagcatttggtagggtcttttcttacaaccaatccttccaagcagttggggcggtcttagggtctttactaggttcaactatttctggtatgtttacttatgaatgggtatttgcagcaactgggattaccctactgattaattatttaatcatgcaattttcttcccaatctcgcaacgcctaacttgttaaaggagtgtttctttatgaaaactatcggtattagtgcaggtattaaaaataatgaggtaattgttgatcgaagtgttgttgatactgttgtaaaactaggatttcttcctcttgtctttgctccagtaagcttaaagacgatgccagtgcctagtgtcaatttcgatgctctgattcttagcgacggccctgacatcacaccaattttttataatgaagagccacttcccgagcttagagaaactgatccacatcgagatcaatttgagctaaacttaatcaaaaatgcccatgattccaatttaccaattttaggaattggccgcggaatgcaaatgttaaatgttgcttttaacggtacacttttccaagatatttatgctcaaaattctggtgcaggtgttcaacatattcagccaaatgatctctctttagaaagtcaccacgttaatgtaactgatgaaagtgaacttgctaaagctgtaggaactcatccctatgttaatagcaaccaccatcaagctattaagactattgctaacaactttaatattgttgcaactgctcctgatggtattattgaagctattgaatcaactgatcaaacaatgttaggtattcaatggcgaccagataagctattgaacgatccgaagcaagaaaaaatttttactaacttttttgcaaaattaaactaaagaaataagcttgagaggtataaaacttctcaagcttattttttaattatttttgtttttacttccttcactcatgtctaagtgaacaattttattaaacatcgctttttcttttggtgaaattttgtgagcaacttcaattactgcaacatcaggatttttcaaaagagtttcatggattgctagagacaagttcggatctagagcactcgtagcttcatcagctaacaaaattggtcgccctgacaataaggcacgagcaatttcaattcgttggatttgtccacctgataaaccattgccagcttcgccaactttatggtcaagcccctcttttttaactaattcatctaaaccagctagatgaataacttcctttaatttttcgtcgctaacctttctacctaaggtaatattgaaccacaacgtatcatcgaacataaaaggtttttgattaacataagagaaataattatgagcttttgcccagtccccagttacattctttccgttaatcaaaattttaccctttactggcttctttaaaccaagcattaggcgcagcaaagtggttttgccccaaccacttggagccatgagaagaatcttttctccaggtttaacctgtaaattaacatctgtaaaaattgtatgcttatctgccttagtttgatacgaaagattttttacatctagtccttcaaacttcttggctttctctgaattttcttttatttcataattaagggctttttgtgttttcttccacattggaacggttgatttaacttggttaaattcattaaacaaggttacgactggcgtaataaagttcattgccaaatctaccatcataaataaagtaccaacacttaagcttccctgcatcatcattatgccaccaatcgtacatggaataatgaaacagaataattcagcagcagaataaattaattctaaggcccaagcttgagttaagttcatatttcgcagagcattttccatattttgagctgattttgttgctcttacgacaatattatctctaacattatagagcttagctgattgagccccatttaatgaatcagaaacattctgagtataattagcatttgttttagcccaaattttagattttttggtaataattctactagtaaaaatttgtacaacagctggagccgccatcgcaactacgaaaagaatagtcatttgccaagaattatataaggcaaaagctaatgatccaataaaagttaagccctgataaatcatatcaagttgagctgtaattcgatttgtttcaatttgttttaggtcattcgtcataagtgacaagccattttttatatcggtttccccttgatcaaccaaatattgtaaattagcctgcttgaaaaccatattaacatcacgaatgattcccatctttacacgctcatagatgaaattactcatcatgaaacagagctgccctaaagccgttaaagctgctaaacgcactaaatgcattacatcctttgaatgcgatgatgccacattcagcataatcttgatcatataagccacaaataagatattacaagcctttattgcagccaagatcgcaaaccaaatcacctgacttcgttttgcatattttaaactcatctaaaactcctcactttagttaagacgttagtttattatatatggctttattttctgaatcaaatacacaaaagtagaccttaatattgaatttttgttgtttaagccagcttcttgtagttttaacagctattttagcagcttcttcttttggatagccgtatacaccagttgaaatacaagaaaaagcaattgaatgtaatttatactttttagccagatcgagactattgcggtaacaatttgctaaaagttctgcatctttttgagcaaaattcggattataaactggtcctacagtgtgaataacatatttagctggtaaattgtagcctttagttatctttgcttccccagtatcgcatcccttgagagttcgacactctgccagtaattctgggccagcagcccggtgaatagcaccgtctacccctccaccgcctaaaagagtacgattagcagcgttaacaattacgtcgacttttaattttgtgatatctgcttggattacgtgaagattagtcacaatttttaaacctttccattaatttatttaatctcatactatattttatctcaaacaaaaaaataagctcatccccaaagtaggaaatgagcttattttgatttacttatcaataattatctcttagtaactgcgattaagtcgtcaccatgcttcttttctacgccatcaatacgttgaacatttgcatagctagtagtgttagtaattacagtcatgacagttgtatcgtatcctgctttctttacagcatctaaatcaactgttccaagtttttcacccttttcaacatgttggccttgttttacatcagtagtaaatccttcacccttcatgtttacagtatcgataccaatgtgaattagaacttctgcaccttcgtctgatttaattccataagcatgcttagtttcataagcaactgtaatttcaccagttactggggagtagatagtaccttcacttggtaccattgcagcacccttacccattgcttcagtagagaagactgggtcatttacatctttcaagctttctgctttacctgaaacaggagcagcaattacttcatcatgtaattctttatcttctttgataatttgttcagctttttcttgttgtgctacttgatcaccagcagattcaacagtaccagattcttcaactacgtcttctttaaagtgacgtttaccgtatacaaaggttaaaccaaaagcaacaataaaactaattactaccgagagtgcccacattggaatgctctttggcaccattgataagaaaccaaggaaaccagctgaaccaagagcagcagcagtaacatgcattaatcctgcaaaagcagcaccaacacctgcaccaattaaagcacagaagaatgggaacttgtacttcaagttaacaccaaacaatgctggttcggtaataccaagtaatgcagaaacaccagatgaacttgctaaacctttaactttttcattcttagttaagaagtaaatagcaaatgtagcagcaccttgagcaacgttagccatacatgcggtaacaaagataaagtcaccggatccacgaccacgtgcatattcagctaaaagttgagtttcaactgctgggaaactttggtgaagaccagtagtaacaatagctgagtaagataaaccaaagatacccataccaaaggcaccagttgtgttgtataaccaaacaatggcagcagtaattgcatctgacacacctttaaagactggtccaataattgtgaaagtcaagaaaccagtaatcataattgaaagaagtggtgtgaatgtgaagtcaactgcagatggtaaccacttgtggaatctcttttctaagaaagctaaaagccaaactgctactaagaccggaataacttggtattggtagttagtttgagaaacatgtaaaccaaagatatcccagtacttacctgctccacctaaagcgggagtagtcataatcataccaatagttgcacccaagaattggttagctccaaaacgtttagcagcagacataccaactaagataggcatgaaaataaatggagcagcggacattacctgaataatttcagataatcctttaacattaggcgccatttgaacaactgacttagctccaaataatcctggagaagttaagaagttgttcaaagccatcaataaaccaccagctactagggctggaataataggaacaaagatatcagataaaagcttgataaatgccattactgggttaaacttttgatccttttgagcaaccttctttaaatcatcagttgaaagctctgatagacctgtcattttaattaattcatcgtagacgttattaacatccccaggcccaataataatttgaaactgaccgttagttttaaaagtacccttgatatctggatcgctatcaagcattttcatatttactttactatcgtcttttaagactaaacgtagacgcgtagcacagtgagcagcggctactaagttgtcgcgaccaacagcttcaataactgcttcagcaacttttttgtgatccatgtctgtctcctccttgaaaatgtgtaagcgttttaaatatttacatgtattatgatagcgtattctaaaattatgtcaagcgcttatcataaaaaatgctattattttgccacattttaatttctattttttaaaatactagtttaatactgttattcgtttgacatatagaccagctttaagttaacattcttatataagaatgcgtttacatattcaatgaggtgaataagttatggaatggacaagagaacaacgttatcgcaaatacaaagattgggatgcacagactttattaaatcttcaagctcaagctgcaacgtctccctatcaaatgcactatcatatccacccactttctggattaatcaatgatcccaatggattttcctattataatggtgaataccatctattttgtcagtcttatccatttggaccagttcatggagttaaatcttggattcactatgcttcgccggacttagtgcattggcattatcttggttcagcaattgatccagacagtgacttagataatgcaggtgcctactcaggttcagcaatggaacatgatggaaaacttctattaatgtatacaggcaatcaccgcgataaagattggactagaattccttatcaagtaattgcggaaatggataaagataatcatattactaaacctaaggaccccgcaatcctgcctccagaccatgtcagtgagcacttccgtgatccacaattatttgagcatgatggaaaatattatgttttacttggggctcaagatgctaagactaagaagggtcacattgatatctatgaatcaactgatctcaaaaattggcatgaaaatggctacttagacttaggcaaagacgaaatgggctatatgattgaatgtcctaacctagtttttattaataattatcctgttttaattttctgccctcaaggattagacaagtcagttgccgactacaaaaatatctatccaaatatgtactggattggaaaagatattaacttaagtgaagcgaaatttgcccctcttcaagaaaaaccagctaatttagatgatggctttgatgtctatgccactcaagcatttaacgcaccagatggaaatgcttatgctatttcttgggttggtcttccagactgtacttatccaaccgataaagagaactgggctaattgctacagtcaagttaagcgattagaaattaaagatggggcgttatatcaacatccagtagacgcaattaagaaattacgtcataatgagaaacagctcaataatgaaaagataattagtcaagcagccggtaagcaatatgaactgaaacttcacttactagccggtcaaagtggaaaattacacttagcttctaatgaagatctatcatcaagtctagtacttgattttaatacagataaaaacgcaaaattaacaattgatcgggcttcaagtggtccagctgttaacccagattatggagcaactagaacaattgacctgaaagatgatcaagatctagatttagatattttcatcgatggctcattatgcgaaattttcatcaataatggtcgtcatgttgcaactttaagattctttgcaccaactccaaaccaaaaaattgcttttgacaaagatactaagtacacgggacgactatggagcatgaattctatattataggaagataataatggtcaaattaaccgatgtagctgccaaagcaggctgctctgttactacagtttcacgcgtaattaataattacggctatattagtcaaaaaacacgtaaaaaagttcatgaagcaatgaaagagttgaattatcaacctaattcagttgctcgatctctgcaaggcaagaaaaccaaattaattggtttaatttttcctgatgtttctaatcctttttttggagaattagtttctaaaatagaagatcaactttttaaacacggctataaaacaattctttgtaacgcaggcaatgacaaagaaaaagagcgtacttacctgcaaatgttaatggctaaccaagttgatggtattatcgctggtgcacataacttaggaattgaagaatatcaaagaactggcttaccaattgtatcttttgatcgaaaactatcggataatattccaatcgttagtgccgataactttaaaggtggtagtttagctactcaagagctttataatcatggtgcacgtcacatttactttgtaggaaaccccactttagatggacaccctactcaaaagcggctcctgggctataaagaaacaattaaggagcttaagttaacagaacacatccatccagtgatctttaacgaaaccctcgccttaaaagaaatggcaattagagatttgctagaaaatcataaggtagatggaatcgtcgcgtcggatgacctcactgctcttcttattttaaatatcagtcatgatttaggtattcatattcctaaggatttaaaaattattggctttgatggtagtaaaattgtccgtgatttcgagccacgtttatctacaattgttcaacctattccctcaattgcacaattacttgttaaacttttagaaaaaagaatcgataatccaactgaagaactggataactatacctactatttacctgtagaactacttaaacgtgaatctagtggaaactaaaaaacattaggcacttcaatgtgtctaatgttttttgttactctaaatacattttcctaaaatcttttagatcttgccttgaaaaaccaagttctttagtaaagtaattttcaaaaccgccatatccaatatcgattgtctgagtaattccttcaatagcggtaccttcaccttcagtaatattcatgcgattaaccattttaatcatttcagaatcacttggaagttgctttttaagaccaaaagtatacagctcatttgttaataaatagtcacgggcaattgtatgctcatcaacacccaggccctttaaaattaatgctgtggtcattccagttctatctttaccagcactgcagtgatatactaacgcttcatcctccggtaaggtaagtagggacgcaaacacacgggcaaaagccttttgactagcgggacttaaaattacattttgataaatttcgcctaaataactattaactttaggaatatgatgtaaaaagcgatatagtttatgactgtcattaacaaaattaccgctgctatcctctgcgtagacatgacaatcgagaacttctaccccattccattgtcggtccggagccattaattgttcattacttgtgcgtaaatcacaatctactgtgactttcatttcttctaacttttcctcatcgcatttagttagactacttaaggaatcagaacgataaattttattccacttaacatgtttaccttcattattttcatagccaccaatatcgcgaaaattaacagtaccatcaaaggtaactaaacgattatgttccatacttttcatcctttattatccatattatctctcagtttatattctagactattttctacagtaattaagtatttgagatttaagttcaggaaaagtttttcccttctgccttgcgtacagaacactttcactttgttagtttattttttataattgatagtaataatttaccgaaaataaattttaggagggacggcacaatatgtcaaaagaacacatcgaagttttaacaattgcaggtcatgatagcgacggaagtgctggaatgccagcagatttacatgctttttatgcacgtggcgtttatggaatggggcttttaacagctgctgtcgcaggaaattctcaaggtatttttgcacaacaattaatgccattagattttattcaaaagcaatttgatgttttaaatgaagactttaaaataaaagccgttaaaacaggaatgctagctaataaagaaattattgatgtagttgctaaaaacttaaaacattatcaaatgcaaaatattgtgcttgatccagtaatcatcactaagcatggagctacacttttagcagatgatgcctatcaagcttttcttgacgaattagttccccttgcaacaattattacaccgaacttttttgaagctcagaaattgactgaacttgaactaaagaatgaagatgaaattaaacaaggcgcaagaaagctacaaaaaatgggcgttaaaaatgttttaattaagggcagtcaccacaatagcaatcaaactgaagttaaggactaccttttattagcagatggttcagaagaatggttaactaagccatatttcaaaacagatcgagttaacggaactggtgatactttatcagcagtaattacagctgaattagctaaagggactgatctcaaaacggctgttaaaattgctaaggattttacttatgaagccatttcacatccaataaatgttggctctaaatatggcccaatcaaccatctagccgctcaagaagaaatgaactaatattttttactaactaggatttaagacaattttaagttatactttgaacatacaatttaaataaggatgataattatggcagataaaacaataaaaattgcatacttatacgaagatttaatgaatacttacggagattctggcgatgttaaagtaattcgttacctattggataagcaaggctatcaaactgaagttgataacatttcattagacgatagttttgatgctaatgactacgactttttattctttggtggtggtcaagactttgaacaaactgttgtagctaaagatctgccacgtcataaagaaacaattgaaaactatatcaaagccggtaatccaatgctttgtatctgtggtggttatcaattgatgggagattattataaaactaactctggcattaccatcaaaggattagggatcttacctttacatacaatttttaaggcagacaagcgaatgattggtgatacccgctatatgactgaatggggcgaagtaaaagcctttgaaaatcattcaggacaaacttactttgataatactaatatgcttcatccctttggtgaaatgattgaaggttacggcaacaatccccaagataaagttgaaggtttacgctacaaaaactttattggatcatattcacacggaccgctacttcgaaacacaaatgtggcaaacgcgattgttaaaatgattttagaacgtcacaaggagcgtactgctaatgaagttgaatccgtttagaaaagaaagcctcaagcgttatctcggtactgataagcactttgtcaaaacgctcggggcttttgacttattaaccattggtatcggagcagttattgggacaggaatttttattttaccaggtacggttgctgctaaagaagctggtcctggtgtaacactttcatttcttattgctgctttagtttgtacgctagcaagtatgtgttatgccgaactctcttctagcatccctgttgcgggctcggcttattcctacggaaatatcctttacggagaagttattggctggattttaggttgggcattaatcttagaatatatgctctcagttgctgcagtatcagctggatgggcttcttatttcaactccttactacacagctttggcttacacatcccgcatcattttgagggaccattcgatccgttaaatggtacgtacctaaatttatgggcagtcattagtgttttattaattggaatcttactttctcgtggaatgaaagcatccatgaaatttaataatgctgctgttttaattaagatagcaatcatatttatttttattggtgttggtttattttttattaagcctaaaaactatcaacctttcacgccatatggaactacaggcgttttacgtggagctacaacagtcttttttgcgtttttaggttttgacgttgtttcatcttcagcagctgaagttaaaaatcctaaaaaaaatatgcctattggaatcatcggtactctaatcgtagcagctcttctctatatgggagtttcagtagttttaactgggatggtaaattataaacaactagatgtagctaatccggttgcctacgctctaaaggtcgttaaccaaggttgggtagcagatttattatcgattggtgctattgttggaatgagtacaatgatgttaaccatgatttactcaagttcacgtctaatttattccattggacgcgatggactcctacctagctttttaggaaaaattgataagcatggtcttccagaaaatgccctatggattgtaactattgtgattgcaattatgggtggtctcttttctcttgaagaacttactagtttagtttcaattggaacactacttgccttcacttttgtttcatttggagttatcctattacgcagaagaaaagatattcctgaaggtgacttcaaggttccattctatccagtaattccaattctttccggacttgcttgcattggcatgatgtgttttttatctgttaaaacttatatttttgctagcgtttggttcttatttggactatttatttactgcgtctatggatataaacatagtaaaatcagtaaaagaaataattaattacaaaaaagagtagttactcgggatttttgagtaactactcttttttattatgacttttcggttcccaattaagtgctaatactgcacaaatgatcattattgaaccaatccaatcaattggagccatcactaatccaaaaataattactgacccaatcgttgcggaaaccggctcaaaagcatctaataaactagcagttgatggtttgatataacgaagtgatcccatcatccattgaaatggaattagagttccaatcacgatcacaccagccattagccaaaaaatgttaatattatttggaacctttggccataccggatgtgctattaccaaagcaatacctgaaaaaagtaagccccatcctgttaccactaagcttgatgtatgatcaagtaatcgtcgtggaattagagtattagtggctactcctactgccgaaattagaccccaaaataaaactgaaggagttagggacaattgattaaagtgcccatgtgtagctaaaaagaaaactcctataaaagcaacaacagcagctattacatctattgcacgtaatacctggtgctcaaatactaccatataaaataagacaaaaaatggtccaataaactgtaatacagtagcaattgacgcattagcttcttgcacaacaataaagtaacaatattgcacgggtaataaccccaacaaaccgtacgcaatgacagtaattgcatcttttttatcagtcatagttttaagtggtcttttgccagtaatttgagcaaaaatcaataataatactccgcttactaccattcgaacttgtgaaatccaaatcggccttatacttgagctgatattaaataatcccttagcaaataaccctgaaatgccccaaaaaacacaggctaatgctgccaagcacgtccacaatctcttttttgtcatatttttccaactttcctaatcttatgcaagattcatcataacatactagaaaaaaattatctttttacctcttgctttttcaacgcaaatcgagttaaatatacttaatataaaaattaaaaagcaatgaagagacgagtagataattttattctttcagtgaattagcgttagtgagaagctagtagaccctgaattatcgaataacacttttccgctgtgctgctagcctaaattaaagtaagctacgccgtcatcggtacgttatcaagccgaagagcatgattgtgttctattaagctggtctatttttagacaatttaggtggtaccgcggaaaaaagcctttcgtcctgagaaactcaggagtgaagggcttttttctttactcttaaaatttttctaaggagtacagataattatgacattaatattacctaaggactaccatccaagtttaaccattcgtgatactgaagccgcaattgttttcattagagaaaattttcaagataaaattgctgacaaattaaaccttcaaagaatgtcagcaccaatgtttgttgaaaaatctactggattaaatgataacttaaatgggattgaacgtccggttgcttttgatatgaaggctatgccagatgatacaatcgaagttgtacactcattagcaaaatggaaacgtctagcacttaagcgttatggttttggaatgcatgaaggtctttatactaacatgaacgcaattcggcgtgatgaagatttagataattttcactcaatctacgtagatcaatgggactgggaaaagattattgctaaagaagaaagaaatattgagactcttaaaactactgtcaaacaaatttttaaagcaattaaagaaactgaaaaagagctcagcgcacgctatccgggttctacttaccgcttacctagcgatattacttttattactacacaagaactggaagaccgctggccagatttagcaccagaagaacgtgaagataaaatagctaaagagaaaaaagcagtattcttaatgaaaattggtgataaattaaagcgtagtggtaagccacatgatggccgtgcaccagattacgatgactgggaattaaacggtgacttactattttggtatgaacctttaaaacgtaaaatagaaatttcttcaatgggaattcgagttagcgaagaatcgctgaaagagcaactcaaaaaagctcatactgaagaaagatctgatttacctttccacaaaatgcttttagaaggtaaacttccttatacaattggtgggggtattggccaatctcgtttatgtatgcttttgcttggaaaagctcatattggcgaagtccaagcaagtatttggcctcccgaaatgattgaatcatgtaaagctgccgacataaaaattctatagcacaaaaaaagactgtctaagccaatcggcttagcagtctttttcgttatttactagctttacgatcttttctagagataataaacataattagaggtaagaggataaatccaaaaatcatcatagcaattgcataccagttaattccagttacttgtccttgggcattgactaccccaaactgagccttccagttatattctactagtaagaaaatcactagaacaatggaaagaattggaactacaatatcagtccacacattcctttgcgcatctaaaactggttctgcagtttttccacgatagaattgaataactgccaatggaactacaataaagcctaaaaaacgtaccatggcacttaaagtaatcaagttaaccatattatattcaaatgccattggaattaaaattgcaaataatacggaaataaagaaggttctaattggaaaattattcttggttcttttagttaaagcttttgaaaattggttttcacgtgccatagcttctaaaattcgtggagcattaaaactagaagcaacattaataccaaacattgaaactaaagcaccaactaagataacatcccttaaaatttcattcttaaaaatagccgcaattgcgacaacttgcttagttgtcattaatgcttttggatcgagcatcattgcaacagcaacaaccccaatataaattaccgcgataacaataatagctaaaggaatagcgcgtggtaagtttttagcaggattcttcatatcgtctgaaccagaagcaactgattcaaatccagtaaaggcatagaaggcagatacgattgccattacaaaacctgtagtagttaaagtaggaacaatcttttgaccattttgagtaatttgatctacctgacttaaattacttgaagcaccacttacaattaataaaactacccctgcaacaataattaatactagagcagctaacttaccaatagtcgctaagttcataacatacttaaccactttttgaccaaataaattaattaccgtaataacagccattaatatcaaaaaaccaatagttacgctcatcgtttcatttgggttaccaccaaaaatagaaatagtagatttaataaccccaactgccattataccccaggcaacactagctgaaaaataacgtaaaattcccatatagaaaccaacattatttccaaaagctgcctttgagtatgcataagctgctccagatttagttacatattttgctgctgctgcaaaagaaatagctaaaatagatgcaaaaattgcagctataaaatatacaattaaagctttagatccagcctgttgaactacgctcccaggtgttaaaaatattcctgagccaataatcgaattaatggccaacaaaacaatagaccaaaagcctaatttacttgtttcattttcgttcatctattaataacttctttctattttttctttgcattatcaataatatatttaaacagattattttgataaggaactacacgatgaagcatttcgggatgccattgaaccgcaataactgatgcatcttcgttttcaattgcctctactaccccatctacacaacgagctgaaaccttaaaatcatctgctacatccttaattaattgatggtggaaagaatttgtttgcatctctttcttgcctaacaattctgcaatcttagtacctgctattgtttttacagtatgagtaagcaaagttggggtctgacattgactatgctttaacgttttttcttttctataactaagatcctgatataaggttccaccatgatatacattaatgatttgtgctccacgacaaattcctaaaactggaattccattttcttcagctagttttaagaggcgcatatcaaatttatctctttcaggccaaatatctcccaatttttgttcaggctcttcaccatagttatgaggatctacatcatgaccaccagataaaattaatccttgaacatttaaaagttgctctttcacaacctcttcatcttcattgaaaggaatgatataagggattccaccattttggattacagaatcaatataatcgtcattaacataactccgacgatagcctggaaaaataccgccatcatcaataattatagaaccagaaattccaataattggtttcatatttactcgctcctttaacttactttttaccagttagacttaattatacattacatagtttaatgcgtaaacactataacttaaaattaacacctttttctcattataagctaatattatgccctaataaaaagaccatccctaaaggaatggtccaattaattactttttattacgatgtttaagcatatacacaaggcttgctaacactaaaactccagcacccacacctacagaaattcttgtctctggattgataaacataaatacaacaatcactaataacattgcaaatgcaaaataatttgaatatgggtagagaggtaacttaaatggatgttcagccattaaatgtgaattattttttctgaatttcaattcagcaatcaaaattacaaaccatgctaccattcctggtaaaacagaagaactatagacaacaacgaacaattctcccattgacttattcatggttgacattatcaaattcaaaataaagccgattaaaatacctgaggtaattccaacgatagctctgtcaggaacaatacgcttcgatagttttccaaaggcctttggcgcttctccctcatgtgccaatttaaatagcattctactagatgaataaataccggaattcgcacctgacaaggctgcggttaaaactacgaagttaataatcccagcagctgctgtgatccctaccttagtaaaggtctctacaaatggagagccaatattacttaattgattccaaggataaattgtaacgatcacaaagattgccccaacgtagaaaatcaagatacgccataaaactgattttacgctttttacaattgcctcttgtgggttggctacttctccagcagaaataccaattaattctatgccctcatatgaaccggcaataattgccattgagaaaaagaatccttttactccaccagtgaaaaagccaccatgtgaccatagattactaaagccgattggttttccgtgatttcctacgccgagtaaaatcaccagcaaacctaaaataatcattattacaattgttactaccttaatcatcgcaaaccaaaactctagtgttccataagctttagcactagccaagtttgccagtaataagaaagcaataattattattccagaccaaaaaacactaacttcaggccaccaaaactttaaatactctgttgcggccacaacttctgaaataccaacaacaatatattgaaagacattagcccactcagctaaatatcccgctaatggtgaaatatactctgttgcataatctgcaaatgatcctgttccaggactaacatagagcatctctcccaatgctcgcattacgatgtataaaattagtcctacaaacatataggctaataaaactgatggccccgtccatttaatagttgatgtagatcccatgaataatccaacaccaatggctccacctagagagatcatctccatttgtccagcagtcatcgatcgctttaatttaggaggatgattctgtttattctccattatttacaccatcctttttatgtcgaaatagataaacaattgtagctataagtaaaacagcagctcccactaatacagaaactctagtttcagggttaataagcataaagataactataacaatcagcatcaaaaatgcaaagtaattggaaatagggtataacggtaacttgaaaggatggtctactagtaaatcttgattattgcgtctaaattttagttcagcaagtaagattacaaaccatggaatcatacctggtaagactgaagacgagaaaacgacaacgaataaatcttgagtagatttattaattgtagctgcaatcatattaataataaatccaattaatattcccccggaaatccctaaaattgcatgattaggaacaattcgtttagaaatatgtccaaaggttttaggagcatccccatcatgagctaatttaaaaagcattctactagatgaataaattccagagtttgctcctgacaaggctgccgttaaaaccacaaagttgataatacttgccgctgctgtaattcctacctttgcaaatgtagttacaaatggagagccaatattacttaattcattccatggatagatcgtaacaataacaaaaattgctccaacatagaaaattaagatacgccacaaaaccgatttaacacttttaacaatggcttttttaggatttgctacctcaccagcagatatgcctagtaactcgattccctcatatgaaccaacaataattgacattgagaagaagaagccttttactccaccagtgaaaaagccaccatgtgaccatagattgctaaacccagttggctttccgccgttccctactccaaagaaaattacaatgaatcctaaaataatcattaagataatagttacaactttaatcattgcaaaccaaaactctagggaagcatatgctttggcactagctaaatttgctaacactaaaaacaaaataataataattcctgaccaaaacacattcacttttggccaccaaaactttaaatattcagttgctgcaactacttcagacattccaacaactatatactcaaatacattagcccactcagctaaatatcccgctaatggatggacatattcagttgcataatctgcaaatgatcctgttcctggattaacatataacatttctcccaaggctcgcattacaatgtacaaaattaatccaacaaacatataagcgagtaaaaccgaaggcccggtccatttaatagtggatgtagatcccatgaataatccaacaccaattgccccacctaaagatatcatttccatttgaccagctgtcatggaacgtttcaatttgggcattgactttttattttccattacttagtgccactcctataaaaaaaactagcagtcacttgagagctagttttagatatcaaaaattgattaatgatattttaatacaggtacgcgttaatgccaaggcctttttaacaaaaaataaggagcttagactcagagctaaatctccttattacttttgcttaaaattccgtttgattttttgccaaatggtaagagcttttctcatgttatctgctggtacatgctttctaatagcacgcaaagttggctttacatgtctcgcagcaaaaataaaactaccattttttttagtacaaatcttaaaacgaggaatatattttccaccaaaatatacatccgcaactacaacggttacttcatcccacggaatctgtacatagtcatttggattattatcactataaaactcaaaccctttatctccgactaaaacttttccatatgtaggaattcctctaaaccaagtcgcagcatctacatactctgattttgtatttaatgattgaaccatataaaaaccttttcatatataagaaaaacggtctaaacaagaccgtttcttatctgattaattgttatagtaagccaattacgtgacctacaataccaacaacaaagataccaataatgataacaattggcgaaactttcttcttcaataaccacatacataagaaagttaatagaactgcagcaagaccaggaattaaactatccaagttttgttgtaaggttgtttgcttaattctatctaaggccataccattacctaggttgtattcactcaaagctttgtgaataccttctgctccttttggaagggtgttccaatcaatataagcacccttttgaagcggagcgcttgaaacaactggtttgaagttaattgttacccaacgctcaattaaagcaccgataacaaacatacccatcatagaagctccacgggtaatcttttgtaataaaccacctgaggcatcttctgtaattttagtaccagctttgtaacccatttcttgagtgtaccataagaatgccatacgaattacattccataatacaaagaacaagataggtcctaagatgttaccactcaaagcaagtgaagcacctaatgaaccaataataggacgaacagtgtaccaaaagaccgggtcaccaacaccggctaaaggtcccatcataccaactttaacaccttgaatagcagtgttatcaacatccgcaccattagccttgtcttcttccaaagcaagagtaacaccgataataggtgatgctaagtatgggtgtgtattaaagaattccaagtgtctctttaatgcaagggatagatctttcttttcaggatataattttcttaatgctgggattaaactgtaagcccaaccaccgttttgcattctttcatagttccatgaaccttgaaggaaagtagaacgccaccaaaccttaatacgatctgatttacttaaagttaatttcttttgtgcagtttcagtcattatataattagcctcctctcgctcaaattttaataatcatccaggatatcgcccaatgggtcgcctgaaccagaattagagttattgttgtttccacccttagaaccttcaagagcaaggtacataatagcaagggaaataccaataccaccaagagcgattaaagttaattctttaacggctgccaaacagaaaccaatgatgaagaatggccatacttcacggctagccatcatattaataaccatagcgtaaccaacggcaacaaccataccaccaccgatagtcataccttcgtttaaccatgctggcattgcatttaagcccgcacgaacaacagaagctggaatagcaagtaataatgcagctggaatagcaattcgtaaaccttgtaaagcaacagcaatcatttgccaacggtcaatggctctccagttagcttcttctgcttttctatccataatatgaacaatggcaacagaaatagtacgaactaacatagttaagaataaaccagcaacggctaaaggaatagcaataccaatagcagtaccaatacccttttgaccttgtccaccttgaaccaaaataatagttgaagcaacagatgctaaagctgcatctggagcaacggcagcaccaatattagcccaacctaaagcaatcatttgtagtgaaccgccaagaataataccaatagttaagttaccagtaaccaaaccaattaaagtacatgccactagaggttgatggaattgaaattcatcaagaattcctcccatacctgcaaagaaggcaacgatcactaccagaatcatctgaatagcattcatttatgtaaatccccctgtaatttatttcttttcatcaactaatttttgagctttatccaaaagttcatccatgttttgtttaccatcagaaggaactttacggacatcaaatttaacgcccaaatctcttaatttcttatatgtatcaatatctttttgatccattgccaaaacagtattgacattcactttaccatcgctatatgccatggatccaacattcaattctttgatgtccattccaccttcaatagctttaagtgcatcttctggattttcaaataagatcaatgccttagtatttccaaaacgtggatctttcactacttcaagcatcttattgattggaacaacatttgctggtacaccagctggtgctgcttccttaatcattgttttacgaattttatctttcgcaacattatctgaaacaacaatgattcgatttggattcatagccttagtccaaccagttgcaacttgtccatgaagaagacgtgaatcaattctagctaaaacatacttaatgtgaccatcaccaatgacagtaccttcaggaatagcaccttgtggttgtgcctcagcagctggagcagcctttgtctcctctttaggcataagagattcaggttgtgttttaattccatcacgacccggtttaacaatagctttggcaatatcatgagcattatcgcttgccattctttgacccaaagcttcgataaccataggtaaattcatacctgatacaatagcccaagtatcttcatgttctttaacaagattatttgcttggttaaatggtgtacctccccatagatcaatcaaaaacaatacttgatcttgatcatcaaaagaagcaacagctttttccatcttagctctaatatcatctggaccttcatcaggctttaaaatcacatgagccagattctcttgcttaccaaaaatcatttcagcagattgaaagattccatcagcaaagccaccatgactagctaggacaattcctaccatttgatttcccccttgatcaaaatatctccacgaatactttatagcagaataaatgtatacgtttgcttttaatatcataccatttttttattgaaaatgcttgcataaagttaaaaaagtagaaaaaaataataactatacaaaaaaaagaagaacaaagataattcttcattcttcctttaactcatcactttactccggctgtcagactcgaactgacgacaacctgattaacagtcaggtgctctaccaactgagctaagccggaatattaaaaaagagcacggcgactgcctaccctcgcaggcagtttcccaccaactactctcggcgttaagaagcttaacttctgtgttcggcatgggaacaggtgtatccttcttgccatcgccaccgtactctttctgagcttttacactcaaaactgaatataatctctagcctttaaacctttgagctttggtcaagtgctcgactgattagtactagtccgctccacatatcgctatgcttccactcctagcctatctacctcatcgtctttaaggtgtcttactgctttcgcatcggaaatctcatcttgaggggggcttcgcacttagatgctttcagcgcttatcccttccatacatagctacccagcgatgcctttggcaagacaactggtacaccagcggtatgtccatcccggtcctctcgtactaaggacagctcctctcaaatttcctacgcccacgacggatagggaccgaactgtctcacgacgttctgaacccagctcgcgtgccgctttaatgggcgaacagcccaacccttgggaccgacttcagccccaggatgcgacgagccgacatcgaggtgccaaacctccccgtcgatgtgaactcttgggggagataagcctgttatccccagggtagcttttatccgttgagtgatggcctttccatgcagtaccaccagatcactaagcccgactttcgtccctgctcgagttgtagctctcgcagtcaagctcccttatacctttacactctgcgaatgatttccaaccattctgagggaacctttgggcgcctccgttacactttaggaggcgaccgccccagtcaaactgcccacctgacactgtcctccagaacgctcagctctgtgagttagaggatccatcaaacaagggtagtatcccaacattgcctccggtaagactagcgtcctactttctctggctcctacctatcctgtacatgtttaacaaatactcaatatcaagctacagtaaagctccatggggtctttccgtcctgtcgcgggtaacccgcatcttcacgggtattataatttcaccgagtctctcgttgagacagtgcccaaatcattacacctttcgtgcaggtcggaacttacccgacaaggaatttcgctaccttaggaccgttatagttacggccgccgtttactggggcttcaattcaaaccttcgcttacgctaagctctcctcttaaccttccagcaccgggcaggtgtcagcacctatacgtcatcttacgattttgcagatacctgtgtttttgataaacagttgtttgggcctattcactgcggctgatattttactatcagcaccccttctcccgaagttacggggtcattttgccgagttccttaacgagagttctctcgctcacctgagtgttctccactcgactacctgtgtcggtttgcggtacgggtaaaattgttctggctagaagcttttcttggcagtgtgacatcatgaccttcgctacttttatttcgctccgcatcacagcttgaaatctaaagacaagcatttgactcatcttttttcttactgcttgcacatgtatttccagcaacatgcgtcattagcctcctgcgtccctcctttgctcatatcgaacaatttcagtacaggaatttctacctgttgtccatcggctacgcctctcggccttaccttaggtcccgacttaccctgggcggacgagcctgccccaggaaaccttagtctttcggcggataggattctcacctatctttcgctactcataccggcattctcacttctaagcgctccattagtcctctcgatctaacttcgccgcacttagaacgctctcctaccacgcatataatatatgcatccacagtttcggtactatgcttagccccggtacattttcggcgcagcgtcactcgactagtgagctattacgcactctttaaatggtggctgcttctaagccaacatcctagttgtctacgcaactccacatccttttccacttagcatagatttggggaccttaactggtgatctgggctgtttccctttcgactacggatcttatcactcgcagtctgactcccgtgcattgatatctggcattcggagtttatctggattcagtaacccctgacgggcccctagtccaaacagcgctctacctccattatcattcacacgaggctagccctaaagctatttcggagagaaccagctatctccaagttcgtttggaatttcaccgctacccacaactcatccccgcgatttttaactcacgtgggttcggtcctccagcgtgttttaccacgccttcaacctggtcatgggtaggtcacttggtttcgggtctacatcatgatactctttcgccctattcagactcgctttcgctccggctccgtcttttctgacttaaccttgcaccataacgtaactcgccggttcattctacaaaaggcacgccattacactttaatgtgctctgactacttgtaggcacacggtttcaggttctctttcactccccttccggggttcttttcacctttccctcacggtactggttcactatcggtcactagttagtatttagccttgcgagatggtcctcgcggtttcaatcgggattcctcgtgtcccgacctactcaggatcctgctaagtctctccgcaatttcgcgtacggggctctcaccctctctggcttatctttccagataattctgctatcacttcaagtactatatcgcagtcctacaaccccaactggcaagccagttggtttgggctctttcctgttcgctcgccgctacttgggaaatcgatttttctttctcttcctgcagctacttagatgtttcagttcactgcgtcttccttcattaaccttaacagttaatgataatacctcgcggtattgggttcccccattcggatatctccggatcattgcttacttactgctccccgaagcctttcgtggttcgtcacgtccttcatcggcttctagtgccaaggcattcaccatgcgcccttttctacttgacctatttcaagttgagtttctctctcttctcggtcgctcttcaatctgttttttcgattgtctcggtttttttgcttttgattatattcagttttcaatgtactaacccttgagactttatgtctcaatggaggctaacgggatcgaaccgatgacctcctgcgtgcaaagcaggcgctctcccatctgagctaagcccccatcattgccttttatcaaagcttttttgctttgaatgggcctaaatggacttgaaccatcgacctcacgcttatcaggcgtgcgctctaaccagctgagctataggcccgattatgcttggcttgttattcaagttgtttgaggtaataccctcaaaactaaacaaagtttctcagtgtgcttccgcttggctttctcgatgacttctcttagtgctctcgcactctccatcatctttcgccttccttagaaaggaggtgatccagccgcaggttctcctacggctaccttgttacgacttcaccctaatcatctgtcctaccttagacggctgactcctataaaggttatcccaccggctttgggtgttacagactctcatggtgtgacgggcggtgtgtacaaggcccgggaacgtattcaccgcggcgtgctgatccgcgattactagcgattccagcttcgtgtaggcgagttgcagcctacagtccgaactgagaacggctttaagagatccgcttgccttcgcaggttcgcttctcgttgtaccgtccattgtagcacgtgtgtagcccaggtcataaggggcatgatgacttgacgtcatccccaccttcctccggtttgtcaccggcagtctcattagagtgcccaacttaatgatggcaactaatgacaagggttgcgctcgttgcgggacttaacccaacatctcacgacacgagctgacgacagccatgcaccacctgtctcagcgtccccgaagggaacacctaatctcttaggtttgcactggatgtcaagacctggtaaggttcttcgcgttgcttcgaattaaaccacatgctccaccgcttgtgcgggcccccgtcaattcctttgagtttcaaccttgcggtcgtactccccaggcggagtgcttaatgcgttagctgcagcactgagaggcggaaacctcccaacacttagcactcatcgtttacggcatggactaccagggtatctaatcctgttcgctacccatgctttcgagcctcagcgtcagttgcagaccagagagccgccttcgccactggtgttcttccatatatctacgcattccaccgctacacatggagttccactctcctcttctgcactcaagttcaacagtttctgatgcaattctccggttgagccgaaggctttcacatcagacttattgaaccgcctgcactcgctttacgcccaataaatccggacaacgcttgccacctacgtattaccgcggctgctggcacgtagttagccgtgactttctaagtaattaccgtcaaataaaggccagttactacctctatctttcttcactaccaacagagctttacgagccgaaacccttcttcactcacgcggcgttgctccatcagactttcgtccattgtggaagattccctactgctgcctcccgtaggagtttgggccgtgtctcagtcccaatgtggccgatcagtctctcaactcggctatgcatcattgccttggtaagccgttaccttaccaactagctaatgcaccgcaggtccatccaagagtgatagcagaaccatctttcaaactctagacatgcgtctagtgttgttatccggtattagcatctgtttccaggtgttatcccagtctcttgggcaggttacccacgtgttactcacccgtccgccgctcgcttgtatctagtttcatttagtgcaagcactaaaatcatctaggcaagctcgctcgacttgcatgtattaggcacgccgccagcgttcgtcctgagccaggatcaaactctcattttccttttgaaaatgagctttttatcgtttagctctaaaactttctttgagttatctcaaatttattgcttgcgaattgacttcgcttttgtttgggatttttatatcccgcacactttcagcgaaactttgttcagttttcaaggtactaccgttgtcatgtgacaacttttatattatatcatgtcttttaagctttgacaagaacttttttaattttctcatctctctcaaatgacagctttataatattatcatcttttgctcgctttggcaagctttttttatcatttttttgataaaaataggagcctagttgactccattggctccggctgtcagactcgaactgacgacaacctgattaacagtcaggtgctctaccaactgagctaagccggaatattaaaaaagagcacggcgactgcctaccctcgcaggcagtttcccaccaactactctcggcgttaagaagcttaacttctgtgttcggcatgggaacaggtgtatccttcttgccatcgccaccgtactctttctgagcttttacactcaaaactgaatataatctctagcctttaaacctttgagctttggtcaagtgctcgactgattagtactagtccgctccacatatcgctatgcttccactcctagcctatctacctcatcgtctttaaggtgtcttactgctttcgcatcggaaatctcatcttgaggggggcttcgcacttagatgctttcagcgcttatcccttccatacatagctacccagcgatgcctttggcaagacaactggtacaccagcggtatgtccatcccggtcctctcgtactaaggacagctcctctcaaatttcctacgcccacgacggatagggaccgaactgtctcacgacgttctgaacccagctcgcgtgccgctttaatgggcgaacagcccaacccttgggaccgacttcagccccaggatgcgacgagccgacatcgaggtgccaaacctccccgtcgatgtgaactcttgggggagataagcctgttatccccagggtagcttttatccgttgagtgatggcctttccatgcagtaccaccagatcactaagcccgactttcgtccctgctcgagttgtagctctcgcagtcaagctcccttatacctttacactctgcgaatgatttccaaccattctgagggaacctttgggcgcctccgttacactttaggaggcgaccgccccagtcaaactgcccacctgacactgtcctccagaacgctcagctctgtgagttagaggatccatcaaacaagggtagtatcccaacattgcctccggtaagactagcgtcctactttctctggctcctacctatcctgtacatgtttaacaaatactcaatatcaagctacagtaaagctccatggggtctttccgtcctgtcgcgggtaacccgcatcttcacgggtattataatttcaccgagtctctcgttgagacagtgcccaaatcattacacctttcgtgcaggtcggaacttacccgacaaggaatttcgctaccttaggaccgttatagttacggccgccgtttactggggcttcaattcaaaccttcgcttacgctaagctctcctcttaaccttccagcaccgggcaggtgtcagcacctatacgtcatcttacgattttgcagatacctgtgtttttgataaacagttgtttgggcctattcactgcggctgatattttactatcagcaccccttctcccgaagttacggggtcattttgccgagttccttaacgagagttctctcgctcacctgagtgttctccactcgactacctgtgtcggtttgcggtacgggtaaaattgttctggctagaagcttttcttggcagtgtgacatcatgaccttcgctacttttatttcgctccgcatcacagcttgaaatctaaagacaagcatttgactcatcttttttcttactgcttgcacatgtatttccagcaacatgcgtcattagcctcctgcgtccctcctttgctcatatcgaacaatttcagtacaggaatttctacctgttgtccatcggctacgcctctcggccttaccttaggtcccgacttaccctgggcggacgagcctgccccaggaaaccttagtctttcggcggataggattctcacctatctttcgctactcataccggcattctcacttctaagcgctccattagtcctctcgatctaacttcgccgcacttagaacgctctcctaccacgcatataatatatgcatccacagtttcggtactatgcttagccccggtacattttcggcgcagcgtcactcgactagtgagctattacgcactctttaaatggtggctgcttctaagccaacatcctagttgtctacgcaactccacatccttttccacttagcatagatttggggaccttaactggtgatctgggctgtttccctttcgactacggatcttatcactcgcagtctgactcccgtgcattgatatctggcattcggagtttatctggattcagtaacccctgacgggcccctagtccaaacagcgctctacctccattatcattcacacgaggctagccctaaagctatttcggagagaaccagctatctccaagttcgtttggaatttcaccgctacccacaactcatccccgcgatttttaactcacgtgggttcggtcctccagcgtgttttaccacgccttcaacctggtcatgggtaggtcacttggtttcgggtctacatcatgatactctttcgccctattcagactcgctttcgctccggctccgtcttttctgacttaaccttgcaccataacgtaactcgccggttcattctacaaaaggcacgccattacactttaatgtgctctgactacttgtaggcacacggtttcaggttctctttcactccccttccggggttcttttcacctttccctcacggtactggttcactatcggtcactagttagtatttagccttgcgagatggtcctcgcggtttcaatcgggattcctcgtgtcccgacctactcaggatcctgctaagtctctccgcaatttcgcgtacggggctctcaccctctctggcttatctttccagataattctgctatcacttcaagtactatatcgcagtcctacaaccccaactggcaagccagttggtttgggctctttcctgttcgctcgccgctacttgggaaatcgatttttctttctcttcctgcagctacttagatgtttcagttcactgcgtcttccttcattaaccttaacagttaatgataatacctcgcggtattgggttcccccattcggatatctccggatcattgcttacttactgctccccgaagcctttcgtggttcgtcacgtccttcatcggcttctagtgccaaggcattcaccatgcgcccttttctacttgacctatttcaagttgagtttctctctcttctcggtcgctcttcaatctgttttttcgattgtctcggtttttttgcttttgattatattcagttttcaatgtactaacccttgagactttatgtctcaatggaggctaacgggatcgaaccgatgacctcctgcgtgcaaagcaggcgctctcccatctgagctaagcccccatcattgccttttatcaaagcttttttgctttgaatgggcctaaatggacttgaaccatcgacctcacgcttatcaggcgtgcgctctaaccagctgagctataggcccgattatgcttggcttgttattcaagttgtttgaggtaataccctcaaaactaaacaaagtttctcagtgtgcttccgcttggctttctcgatgacttctcttagtgctctcgcactctccatcatctttcgccttccttagaaaggaggtgatccagccgcaggttctcctacggctaccttgttacgacttcaccctaatcatctgtcctaccttagacggctgactcctataaaggttatcccaccggctttgggtgttacagactctcatggtgtgacgggcggtgtgtacaaggcccgggaacgtattcaccgcggcgtgctgatccgcgattactagcgattccagcttcgtgtaggcgagttgcagcctacagtccgaactgagaacggctttaagagatccgcttgccttcgcaggttcgcttctcgttgtaccgtccattgtagcacgtgtgtagcccaggtcataaggggcatgatgacttgacgtcatccccaccttcctccggtttgtcaccggcagtctcattagagtgcccaacttaatgatggcaactaatgacaagggttgcgctcgttgcgggacttaacccaacatctcacgacacgagctgacgacagccatgcaccacctgtctcagcgtccccgaagggaacacctaatctcttaggtttgcactggatgtcaagacctggtaaggttcttcgcgttgcttcgaattaaaccacatgctccaccgcttgtgcgggcccccgtcaattcctttgagtttcaaccttgcggtcgtactccccaggcggagtgcttaatgcgttagctgcagcactgagaggcggaaacctcccaacacttagcactcatcgtttacggcatggactaccagggtatctaatcctgttcgctacccatgctttcgagcctcagcgtcagttgcagaccagagagccgccttcgccactggtgttcttccatatatctacgcattccaccgctacacatggagttccactctcctcttctgcactcaagttcaacagtttctgatgcaattctccggttgagccgaaggctttcacatcagacttattgaaccgcctgcactcgctttacgcccaataaatccggacaacgcttgccacctacgtattaccgcggctgctggcacgtagttagccgtgactttctaagtaattaccgtcaaataaaggccagttactacctctatctttcttcactaccaacagagctttacgagccgaaacccttcttcactcacgcggcgttgctccatcagactttcgtccattgtggaagattccctactgctgcctcccgtaggagtttgggccgtgtctcagtcccaatgtggccgatcagtctctcaactcggctatgcatcattgccttggtaagccgttaccttaccaactagctaatgcaccgcaggtccatccaagagtgatagcagaaccatctttcaaactctagacatgcgtctagtgttgttatccggtattagcatctgtttccaggtgttatcccagtctcttgggcaggttacccacgtgttactcacccgtccgccgctcgcttgtatctagtttcatttagtgcaagcactaaaatcatctaggcaagctcgctcgacttgcatgtattaggcacgccgccagcgttcgtcctgagccaggatcaaactctcattttccttttgaaaatgagctttttatcgtttagctctaaaactttctttgagttatctcaaatttattgcttgcgaattgacttcgcttttgtttgggatttttatatcccgcacactttcagcgaaactttgttcagttttcaaggtactaccgttgtcatgtgacaacttttatattatatcatgtcttttaagctttgacaagaacttttttaattttctcatctctctcaaatgacagctttataatattatcatcttttgctcgctttgacaagctttttttgaacttttttatttgctcttttcgcttgcctcaaacagcatgtattactttacaggctttttcacttttcgtcaacccttttttgcaaaaaattagcaatatttttttagagtgctaaaaaaggcctcaatttgagacctttttgattaattctgtagtttagaatgttttataccgtatgttgcatacacaatgattcccacaattaaccagattcccaccataatttttgtcgtatttggtaacatccaaatgaaatatacgcttagtaatccagcaattacaggcagtaccggataaagtggcatcttaaatccatcattcacaatatcttttcgatgccgtagaggaataattccaaatgaaattaaagcaaatgcgattaatgtccctgcattaattaatgaagctaattccattaaaggaaccaatccagcaaaaacagctgctactattgtagagacaattactgcgtgatcaggaatcatctttttagcatgcacacttcccatggaatccggtaataatccatctcttcctaaagcatagagtaatcttgagccgcccagcaacatagtaatcattgcggtaaagattccgactaatgctccaacggtaatcaatttattccacgcagttaagccaactacttttagtgcataagctgctggatcatcaacatttaattgtttgtaattaaccattccagttaaaactagagaaaaacttacatatagtagaacagcaataatcactgtccccatgattcctttaacaacgtttttttcaggatcctttgtttcagcactgtttgctgctaaagcatcaaaaccaataaatgcaaagaatacagtggctgcagctgtagatattcccccaatccctaatggtggtgtttggaattttttaggataaaatgggacatagttgtcagccttaatatagaacatcccaatcacaataaacaaaataataattgcgactttgataattactgctatattttccacacgtttagataagttagcaccttgatataaaatcaaagcaacgattaacacaattaaaacagcagaaatatttattactccaccttccattggtccagcttcaagtgctttaggcaaatgaattccaattggcgctaaaatattattattaaaatatgaagcaaaaccagtcgcttcagcagaaacagctaaaaaatattctaataataatccccatccaattatccaccctactacttctccatagattactgaaccaaaagaataggcggagccagctactggcattgcagaagaaaattcagcataagccattcccaccataccagaaacaattgctgctaataaaaaagaaatagcaactgctggaccagcatgctgtgccgcttcatgaccaggcaaaataaaaattcctgttccaataactgccccgattcccaacgcaactaaatcacgagcatttaaatgtctagttaagcgagaatctgcttttaaaaaagtatttactggaactttcttaaagaagtttttcattccaactctccttaatttatttttaattattatacctgattttatagctatttctaccctataattaaaattaattaaaaaaagactacgaatttaattcgtagtctttttttaaaatattgctaactatttttcttcttttttatcagctttttcagcttccttgatgtctttcttttcttgttcacgagtttccttgtcaaacaatacatcttcaagaatttcaccatttaagtacaaatgcttatcatcaatagtgaatttaacttccttagtatctggcttagaaacaatcaacttagctgctggggtttcaagatcttgttcaacaactcttctcaatggacgagcaccaaattccttgtcataacccttcttagccaagtacttcttagcatcatcagtaacatgaagcttaatgtttctcttagcaagagacttctccatctttactaagtaaaggtctaagatcttgagcatatcttcactagttaaagaattaaatggaacaattgcgtcaagacggtttaagaattctggtctgaagtaaacttcaagagctttacgtaaagcatcttgatcgtcacccttaagtaacttgtcagagtatccagcatttgaagtcatgataatgattgtatctttgaaggaaattgttctaccttgtgcatcagttaaacgaccatcatccatgatttgaagcaaagcattgaagacttgaggatttgctttttcaatttcatcaagcaaaatcaatgaatatggttggtgacgaatcttttcagttaattgaccaccttcgccatagccaacataaccaggtgctgaaccgatcaacttattaacagccatttggtcttgatattctgacatatccaaacgtaccaatgcatctgccttaccaaataacttaattgctaattgcttagctaattcagtcttaccaacaccagtaggaccagtaagtaagaatgaaccagttggacggttagaatccttaaatacttgcttacgtgcaattgcatcagtaatgatgtcaatggccttgtcttggtcaataacaactttcttcaagtcagaagctaagttagcattcttttgagcttcatttgcattaatttcactcattggaataccagtcttagtttgaattaaagcatacatatcttctggtgtaactttaagttcactagctttgccggcattcttaagatctttcttaaggtcttcaatctctttcttaatcttagcagcttcatcatatttttccttcttagctgcttctgcctttttaccttctaaggcatgaatcttgttcttaattgaagtttcatctttttgatccatacctaaggacttcttagcaccagcttcgtccattaagtcaatggccttatctggtaagtgacgatcattaatgtaacgatttgaaagttctgcagcaagcttcaaagcttctggatcatatttaacattgtggtatttttcatatcttggagctaatcccttcaaaatttgaatagcatccttgatagttggttctggaacttgaactggttggaatcttctagctaaagcagggtctttttcgatttgttggtattcactagtagtagttgcaccaataacacgaatttcaccgctagctaatgctggctttaagatattagcagcatccccagaattattttctgaatcagtagaacctgcaccaacaatattatgtaattcatcgataaagagaataacattcttgtcacccttagccttatcgataatcttctttagtttttcttcaaaactaccacgaagagaagtacctgcaactaattcattaatatttaactcaataatatgagcattctttagtttttcaggaacgtctccatcaacaattctttgagctaatccttcaactaccgaggttttaccaacaccagcaggaccagtcaaaacaggattgttctttttacgtctactcaaaatttcaataacttgatcaataacagcggtacgtccaatgacaggatcatatttacccttcttagcttgttcagttaaatcaacaccaattggcttttccttttgttggccattttgagcgccttgttgaggtgcttgaccagcactatatctcattggttgttgaccactagtcattcttccatcattgaaaaaatctctgtttaattcattaaacaaatcatcaaaattatagtttccattgtcaaagtatgccatgctttacacactcctcatattctcaaaaattttagcactcataagttataagtgctaactactcacatttcttattatagcaggttatccacagaaagcaaaatattatttcctctttttccacagattattttaatttgtgagcaaaataagcgtaaagtgcttaataaagcattttacgcttaaaaagtttgtgaattaatattatgacatagttctaaaattatttatttttattaattttcaaataatttaatcatttattatctttttctttttatgcttgtcctggggtctttgattattgccaggaatattgtttccattattgttttcaagcaaatactgcttaattaactgaactacttgtttattttgcggaagagaagaatgttgtgcatccgatcctgtaactgtcatcgtcgtatagtgctttacctgattttgaaaaatatattttcctgctgccacactactttcaggtactaacccatccgactcataattctctccccctgatactgaatatacatctaaattcttaggaattttctttcgatttttaataaaatcattcagcatttcggttttatggtcaacattactctcattaaagttatatggtgtcccgagggtcatcaatttctttattttgatttcatcactataatctgcatagtatttttctagccaatatgtccaaatcaatccaccatttgaatgtccaaatgccttaaaattattaaatttatattgctgactaagctgagcaaaagcctcatcaaaccaacctgcttgtttcttaatattggcgtaaccatcatgattattttcaaatcctactacaataaacggttcattatcattacgattaattttaccgctatacttcaatgtaccatctttcttcacttgaatttttaatagactatgctttttcagagtatctttatttagcagattaaccaattcattaaaacgctcagtagttgcacttgatcctggaatcataattacaggagacatttgtgactttcgtctttcagctaaatcatgattagcacttttaatccaaaaaaatgttggaatagataaaactatcaaaaagatgaaggtacctagcaaaagcaaacgatttttcgatatcctatctttatttaacatattcatagccagcctcctcatcatttaacaaatcaatttcgtcttgaacatccttggccatcttcacaattggaagatataacaaaatatcgaatgcaaacagcagcattgagaaaattagcgcttgccagtttccatttgtagcaataaaggcatacaaaggtcccggagttccagataatacattgtaggctgaagccggaattaaatgtattgcaatcatacttgcagctaaaagcatatttacaactggtaaaaatacataaggcagtaagaataatgggttaaggataataggaataccaattaaagccccctgattagagccaaatagagttggaataaaactccaacgggcaactctagcaatatcatttttcttaataaaaattaaaatgccaatcaatatcactaaggttaggccgttaccaccaaattttccataagattgatataaagaatttcccacatatggattaggtacattccaacttgagccatgtgtcaaagcatagtttaaattagcaacattagtcgcactatcaccaccagcagtaagagatactaaaggctggccaatgccacaccagtttaacaacaatgctagaagtaataagggaataaaaatacccagatttaaattattctgtccttgactttggaaaaattgataaaagtttgtggcgatcattcgtacatggactaaactagctaaaatcccaattactaatccaattaaccaagtagcaagcatcggacgaaatgaattaaaagctctttgctttattacttgggcactttctgcatggcgatgatgatagtcagttccaagaaatctaaaaatgagtcccgttccaaaaccgatcaagagagcaaataaaaaactattaatattcaaaaaacgccagttaaaagatagttggaaatctctaatatctctaaaacgatatgcacataacagcaaagctagcattcctgaaacaccagccatctgggcatctttttgatataaacgtgcagtatattgtgctgaaaaatatgcagtaaatagtccaaaagttccaaatattacactggtaacgccctgacaggcataccaggatgcattaaaaatctgatcaggtaaccacttatcaaaataaaagatattagatattaaactcgttggagagaaaacactctgccataaaaactgaaaaatacttcctacaacagcaagtggcattagcatcatcagagttcgatcagttactctaaaaaatgctaatctacgaagtcgcacaatagttttaaaaataattttttccataatttaatccttacctctaataatctatttcctagtttaaattaaatattgtaagaaacctattcttttttattaaaatacagcttaaatcggacaagcttctttaaacccagattagacaaagaacatgctataatgatgaggaaaataaaaaggagaaaaattatggctaaacgaagtttttcgattaatgatgaaactgaccgtctactcaactactatttaaatcattcagataaagaatgggacttagtaattaatgaagcaattaaaagctatgtatgtgatcatttaactcaaaagcaagttcatgaagcagttaaacataccggaaaagatgcctttccagctaatgaagttcttcgtactttcaatagtagctggatcaatggcgagtcttaatattcattgcataaagtcataccttccggcaaaataaaggtagcaattctacaaaataagctgacacttgtcagcttatttttatacaactattcttgattaaaaggaggaaaatacatgctaaaaaaacatgcgctagatccaattaagttaatctggttatttgctggttctttaataattaatactggtgttagttttatttggccactaactaccatttatattcataattatcttcatgagacgcttacagtagctgggattgttttattcataaattcagcttttacaatggttggaaatgcagttggaggccttttatttgataaatggcatccttaccaaacccttttaactggtgtcagtatttccaccttatccactttcttgctagtgttatttcatggctggccagcctatccaattttgttaattactttaggcttaggcaacggtattgtagtaactggcttaaattcaattgctactttaattcaaagtcggaatgcctcttatgtgtttaatgtcttgtatttcactcaaaatttaggtttagtatttgggtccctaatggtgggattcattttaccctttggtattacttatattttcttacttgcttttattatgtttgcctttttaagcattgtaatcttttttgaatatcgtggtttaaaccaggctcatgcctctacaaataaaaaaacgactacagctgcccatcaagaaaaaattccttacggcgcaaaaagagctattttctctatcttaatttgtgttctagctgcttggattgcttatgaacaatggaattctaatatttcctcctacatgcttggcttacacatgagcgttcggttatatagtttactttggactctaaatgctattttaattgtccttattcaaccgctattaacttactttgatgactggctaactgcacatcttcatggacgattatatattggttttagtctgtttgggctagcattcttactactaattggagcaacccactactttaactttgttttagccatggccgttctaacatgcggagaaattttagcatttcctgctgtttcaacttttgttaatgatcgtgctagtaataaagacaagggaaaataccaaggaattgttcaatcagttacatcagctggtcgagctctaggaccgctaattggagctttagtaattgataatttttcctatttgaccttatttgtagtttgcactgttttggttttaatttctgtccttctatttgcaatcattaatgcttataacaagaaaaaaatcgctgaatagcgattttttattttctctaatttacaaaaaaagcctaattccaccaacatcggaatcaggctcacacagtgttaggtaccgctattctgaccaaataaaagatacattttcgctaccgtagaaaatgcaccttgctacaacggtacaggtaaatcttagcacagcagccctacttgcacaaccgcttttaaggaagtcaaaatcataaaaaaagagatagaaaatattatttcctatctctatgaaggcgattttattaaattttccatgagatcgttacatatctctctcaccttaaaatagtccttaactggataattagactgaactactaatacatcgcgcgtgtcatttgatatgcggtagtaagttgtatatccatcgcctgaaccatttgaggaatgaaaatcagggaaattataaaaaccagcattatatttagcaggatcagctggagcataaaccgtttgtattgatgaaggttttatgatttctccatttaaaatcgcacttgtagctcgatataagtcactatttgacattactaggcttccagcgcccaaatctccacgtactctatctacggaaacactatgtggtactaaatatccctgagagtttttagtgtacggtactgcaaccttaatatgcctattcttaggaatgtcccaataaaattctgtttcggaaagccctaattttttaatataggtatctttcaccaaactttcataagatttatgggttactttttctaaaacaccagataataaaatatagttaattgacgagtaaaagcgttgattgtactgtttcttatcgaaaactatattatgcttaatatcatatttaattccagcttgattatttttaaagactggcgttccatagctcgattcatcttttctttgtaatccggcttccatagttagaagctgcccaatcgtaatttgattagcatgggatacttgaggatagaatttcgataatttgtcattaagtttaagctttttctgctcaacttgtttcataacgagggcaccagtaaaaaccttattaactgaattaataaaaaaagctgttttgggtgtattatgctcttttttactaacatttgcatagcctgtagactcattaagaattactttattattcttaatcgccaggatattacctgtgatacctgcttgagttagtttttttttatgtctactgccgccttacttttaacattaggcatctttacattagttttattgccccatgccttagtaaagtagtaactatttagcttatagttgactggatgattcttttcttccataaatggtttcacatattgatccacctttaaccatccattccaaccaaggtggatagtatcttccatgaagaatttctttccaccgtcttttgataagttagctatattattgaaaccttgagatgtaagctgcttggtaatcttagcaacgcattcttgatacattgtctgagataaaccagtgtacttagcccacttttcattaactggtggaataatgaacaagacattaacatgttcatgcgcaagttcatttaataccaattcaaagtctgcatattctggtgactgagtataatcaaaatctctttgagaattctttaggtgctttaagtgcttattgtttaactttttgtcaaagaaaccattagaaataccaaacttattatttgttgttccctgttgtccctgttcattagcaaattgacgtaagttgtcataggcataagtacctggcagtttacctgcttctttttgaatcttaggaatgttattagtcatcccaatagatgagaagaaattatcttcattagctaacattcgacgtctagctttcaaatacaaagtttgatacttagacaatttttgtcctgaagctaaagtcattaatgcatactttgttgtctcactagcagttccagctggcatatctaataagcgtcgagcagcataacgagtagctacactgtccttagcagtcaaaatccaatcaactgcttgaagttgagaaaaatacatcccaaaagctgctggattttgaccttgcttagtaaaccactgtggagaaataataaaaactgcttttttattagaaagctgatttactgtttcctgcatagtgaaaaagtgagttaaggattgacttcccggtcctcctagtaagaaaggtcgataatttcttttatatttataagctaagacacttgggtgcaaggcatccattcttgataattcactagaaccataaaatggaacatagtttttctcaaaagcagcttgcttaatcgattgacctttaaagacagtttgagattgtgaaactgaagctttaaagagagcattatctgacttttcaccattttgccatggaattaaaaataaaattattagcaaaatgaaagcacagagaactgggccgaaaatctgccacagtttacgtttattactcatttcttaagctttctacctttgcaatgattttgtttggagtatcccaatcttcacggtgaaattctgatactggtgcagttacatcacacttgtcttgtaattcaagtaacatttgaacagttgccatggaatctaacaaaccattttcaaaaatgttttcatccatttggtcacttaaatcttcaccagttaattcatttaaaatatctaaaacagcttgctttgtatccataataagaaaatcctttcaaaaataataaactacttccagccaaaccataatgtactcaagaaacctgagaaaattaggaaactgaaacaaacaacattaaatgttaagaaaatcgcaaaccactttgtaaatttattatgtgggatttgcttgcggtgcttacgcttaaatcttaaccaaatatcattaatgataattgccaaagcatggtaaataccatatacgatatagtaccacgttaagccgtgccagaaacccataattaagaaatctacaaaatatgctaattgcgacaatctgattctatttttcaccaatttatgcttcattgcaaagaatgtaaaacgcataaagataaaaccacggaaccagaaggatagagtcatgtgccatctattccagaaatctttaatattttgagaaataaatggtttattaaagttcataggagttctaattcccataaaatatgacgtacctaccgcaaacaaggagtatcctgcaaagtcaaagaataaatacatactgtagcagtacatataaccaagcagagcccaagataagcgtaatcccccattagcttgcccataaaaaattgcatctttagctaattgaggaagccataaggtaccaaatacatatccaataataaatttatataagaatccttgaaaaatatatcttgtaccaaactttaaattttcaatatacttatctctttcaggggctttatcgtaatcttctttaaatcttcgatagcggtcaataggacctgatgaaatagttgggaagaaaagtaaaaaccttgcataagtaattggatcaactttcttaattgttttatcacgaagttccataataacttgtactgttttgaaagttaaatatgaaattccgaaaaatccaatcaaatcagcagttttatttggtactaatggtgcaatctttactgccgctagtggcaaaattgctaggataactgctaaacaaaagacagaggttttattccttccagaattaacatatttttgataagcaaaagtaactataaattggaaaatgatgtatccaattaattgaactccctgtagccagtctttaccattaaacattaaaaacaagaatagtaaggaaacgaaagcttcgtatgttttaaagcgccgtccatgatataaaccaataattaatggcaaaagcgcaataaaaagaataacaaagtaacgcggattactatagggttgaatattgatcacgcgttatttacctccttaattacttgtttaatatctactttaccgttttgagagattggcatttcatcacggtagataaagcgttgaggaagcatatatggcataatatcttgacttaatgattcgcgtaatttcttagttagttcagcatcagtatacttctcacgtacaccgtctgctaattctactacagcaactagttgttgaactttatgatccttattgtattttggagcaacaacgccataacgcactaatggattcttagcaagatagaagttaatttcttcaagttcaattcgataaccattaaacttaacctgaaaatcaattcttccacggtagaaaagcatgtcgccatctaaaaatcctaagtcaccagtacgataacttccatgttcactttctttaaagaaagcagcctcagtcttttctggattatttaagtatcccttagagacacttggaccttcaataacaacttcgccttggttatcttcttcacccttggaagtatcaattgaaatctttgtgtcatctttagaaacaccaattggcaatcgatcatacttatttaaaatttcatcagtaatttctacctgagtaacagcaacagttgtttcagtagggccataggtattaaagatatggctatctgggaatttcatcttaagcattttagctgtcttatgacttaattcttcaccacagaataagaagtgagttaattcaggatgatgcttagcatcaaaagtaggatctaagaaactcatttctacaaatgatggagttgaaacccaaacattgaattttaattgaggtaaagttttgaaaagctgcccgatattttcagttacatcatgaggtaaaactactaacttaccaccggcagttaaagcaggatataaactcattacagataagtcaaaagaatatggtgcttgagctaagaagctaggatgttctggaagtgaaaagtcatttaactcccaatttacaaaactaagcagattatcatgactaatttgtacacccttaggcttacctgttgtccctgaggtaaagataatgtaaaaattgtcatccccacttacaaacttactttgatcaatttctggatgattatcagaaacttcttcaggagttaaaactttgatattatccatttcaataggaagtttatcaattgcaattaccaaaggagcttcagaaacttcttgaatcatcaataaacgttcgctattagaataactagcaatcggaatgtaagcatgtcctgctttaacagcaccaataaaactagcaatcatttcaaagttttgaccaccccaaatcattactggagctttttcaggaagatctagttcgttgatcttagctgcatatgcatctgatctagcctttagatctccataagtattagtttcgccaagataatcataagcgatccgttgtggatcttcagtagcaatttgatcgattgtcttgattacatctttaatcatttaatgcgaccctttcagttctagaaatctttataaataaattttgcagccccaatgccactatatgagtacaagtaaactagcactacaagcactgcaaagtaaaagagagttttagcaataaacaagcctacctcttttttctttgtattgctttgtttatctttatcttctgccatgcttacacctcgtaatcttttttctaaattttacaacaatgttataaaataggttatgatttttactatttcttagaaaaatagcatgaactgaagtaattataccaaaaatagccgtagttatggatagttcactaatgttggttacgttttctttcgataaaataacctatccctaagaaaattgtcggtagaattgaaacaaataccaacactattaaaataactcgtaaaagccaatcagtatttgtccaccttttatcattagcagtagcaagagcatatgctgaaaataagataattgtaattaaatttattaagaacataatattgtgtgtatattgatacaagaccaacacactactaccggatatcaaaccactccaacctgctaatcgtacccaaaaagatattttcttaatcatttttaaccccctaataaggcatttatattcgccgatagaattcggtcaacaatcattatttgatcacgcgcatatgcttttgatcctgattcaaataacatcagtagctgcccattttgaacataaatttgttctagatatggcggcataataacaactttttccgcatttccttcatctaagttattcaaagctgaaattgggaaaaaatacaacttagaatctttgcttccataggattgacttaaaataatccaattctgataaaatgcaattccttgaatctgtcggtccattgaagcacttcctgaacctaaggcccaagatacttggcctgttactgctttgatttgatcactagtaattgttcctttaaaatttcccgaacgagcaataggatagctagcaatttgcccttgtccatcagtattaaaaaagccaacaaataattgattatcataataagttacacaagatgctctttcaattgttggtaaagaaattacattatcatatttaataggttgctttttcttattataactatacttttccaatttctttaacgaaaaagacattagtgccgatgaatcatcttgactacccgttacccaaatatttttagcaattggatcataagcaacccctcctaaatgaggtgctcccggaacttgaatagtctttaaatattttcccgtttttttatctaaacaataaatgaccgagcgatgattatgagttgaatcgtaagccgaaattaataaatattttcccgctacagttaggccttgcggagtcattgaatctgcatcagtaatcttctttttattaaaatcataacttggcgttacaacttggcctggtattactacactactgccaattttacttgcacgtggcgtttcataagctgcactataaacatcaggatatttttcatttaattgtcgtttgaaataagccaaattatgatgaccaggactaatacttgttccatcttttgctttttctacatcaggtctagaagtaaaagtagcttttgcctgctcccgtttttggtattgttgataaccataatatcctccgtatgccgctcctgcagcaattccgagaatcaaaaccaacttaaataaaatctttaaaaatttcttcattagctttccctacctaataaataattttctcaattcgatattatacctgaatcctttccttgctaccgaaaataaaaaatgagtatctctcttatatttcttttggttttgtactataatatataaattgtagtagtggattacttatgatccattgctattagcattaacatccaactttttattttcattcttactcctccaagtagattgaataataacaagatcagcttaacgctgattatctatctttgaaagaacctatgcacttcccagcataggttttttcttttgcaataaaaacaaaaaaaaggttcctttcacatttggatacctcttttaattgtctgttcatttatccccaatggataaagtctaatgcatttttatcttgagtatatctagcataaactgaatttcttaattgattccagatcttgctttgaaaatcatttaacttaaattcatttagtgccatcgaattttcaactagactaacaacattaaatagttcggaagtcaaagcaactgcatgatattttcctgtttttaaattagtaattgttttgtttatttgctcaataacttgaattttctcaggtgacttattatcagctaaacttagtttaaatgcttcaagtaagctgatatattcttggatactcatttaattaccaaacaccaaattgattaattaatttaaatattatttcgtttttttgcaaatttttatccgttggatgcaaaaataaattccatgcttcagattgttttttagaaaaacgcaatcctctaaaagcaagagcatcattgatataactcatcgtttttccgactcgaatagataaagttattccctcatactttttattttgtaaatcaaataatgtttcatcaatgacttgatatagttcagtaaaattagtgaatgtattcaaatcaccatatggttcatgttttagttgatattctaagtttttaagtaatacaattgcttgtttaacttctgattccatactatcttggccatcctctaccaccactaataaatcccgtagcaacactattagccatattattaatagtgctacttactacaccgccccagttaactctacatttaccattttttagtgtagctggtccatacgagtagccctttctgcattccacattagatccccacggcataggatcataccagccaggagtagcagcagaagccgtattactactaaagtataaggcagctcctgtcataacaggaataaatgctgttgctaagaataatttaccctttttcatgatgtttacctccaagtttagaaaaaaatttttatttttttggaaagcgccttcatctaattaaattttatcataccaattataaatttcaattatttttccaaatatatcttagtattcatacagctaatgcataagaagtttacgtgttaagatcacattttaatgttagtggtataccaattttatatttttcaaaaaaattgtataaagtatgcttccataatacgattatcttacagaaaatcatttctaaatttatcgaaagatccagaaggtgaaaaagatggtttctaaagatgaaattattacaataatgtctgagttagttaactcacttaataatacaaatcctcattcagaatttactaacttccttacagatagtctaaacacaattaaatctagcaatggtgttgctttcacaggtcaactgcaatatttttttaatcacgcccctgttgtaaagttttccgataatatcacatttacttcgcaagaagaaaaactatggaataaactcctctctctaaacgagctagaaaataatctttggggtgcaagtttataattcatttccaacttcttaatcaaatttaacttttttaataaaaaacgtcacaatttgttcacattttcattctaatatataaaccatagcaacggggaagacaaaaccccatcgctattagcattaacatccaactttttattttcattcttactcctccaagtagattgaatacatttatcagtctttgactgatcctatacttatatattttgaaatccgcgtctttcccagcgcggatttttttgtgggcttattttcgagactttcatataatgataatagaatacaaagtaataaattcaattaacttaggaaggattattatgttttcaccagtgattcagtctttgattgcagaaaaagcaggttcatttattattcctgcttctaggattgcatttgtggaagacgaaaacccactctaccatgcttttttagttcttactaaaatgaaatattcaaaaattccagttttggataaagagcaaaaagtagttggcttaatcagcttatcgatgattacagacacgatgctgacgcctgataatattgtgattgaacctctatcggacttaaaagttaaagatgtaatacagacaaaatttgaaacaattaactttgcccgcactaatcttgagacgcagctccatcttctagttgataatccttttattccagttgtaaatgacaataatatttttcagggattgctgactaggcgagaatggattaaggcctttaattatgtaactcattcaattgaggaaaaatacaacattactaagaaaactttacagaaagaaaacccaataacttaaattcaataagttaagttgtataatagtaatgttttagtattattgattaaattagttggagggaaagctaatgagaaatcaatggaaatttttcacaatccttgggattggtgttgttgcagcaatcttagacttcctatgtggagcacctaagattggtgggtggccaatttccggtatcttaattgatatcttcggaatttttatggctattaccatgcttcgagaaatgattgaaacccttgaatctggtcgttggggcgtagatatcttggcaatcatcgctgttgtttcaacaatgattgtcggcgattactgggctgcttggatgattttaatcatgttgactggtggtgaatcacttgaagattacgctacaagtcaagctgataaagaattacgctctttactaaaaaattctccaagaattgctgataagttagtcgacggtaaaattgtagaggttaaagttgatgagttaaaaattggcgatatcgttttaattaagcctggtagtcaggtgcctgtcgatggagaaattattaagggaaactctagttttgaccaatcttctttgacaggtgaatcagttcctgttgataaaaaagttggcgatgatttaatgtcaggatcaattaatggggatgcagctgtagaaatgaaagttactaaggctgctaaagattctgaatatcagtcaattgttgctttggttaaatcttctgaagctaaaccagctaaatttgttaaaatggctgatcgctacgctgtaccattcactattgtttctttaatcattggtattgctgctatgattacctcagctgtaactaatccagctcttggctggcaagcacactttttacgttttgctcaagttatggttgttgcctctccttgcccattgctaattgcggcaccagtagcaatggtttcaggaatgagctcaatgtcaagaagccacattattgttaaatctggtaccactcttgaaaagttatcccgtaccttaacttttgcttttgataaaactggaaccttaactgaaaatcaactagttattgatcaagttgttttaccagaaaatagttctatttcaaaagaagagttacaaagcttggcagctagcgttgaacaacaatcgagtcatgttattgctacttcattagttaaaagtaccaataaggatttaattaagccagttaccaacttaaaagaagctactgctaaaggagttagcggtgaagtagacggtaaattagttaaagttggtaagctttcttatgttgatccggatcaagaaaaaatcactgttcaatcaactgctgtctttgtttcaattgataataagttcgctggatatattactttccaagatcaaattagaaagaatacaccagaaacaattgctcgtttgcgtcgtcaaggtgtaaagcaaatcatgatgttaactggggaccgtagatctgtcgctgataaagttgccaaagaagctggaattaaagaaagcgaagttcatgcagacttacttccagctcaaaagattcaagccattagagatgttaaacctgacttaagaccggttgcaatggtgggtgacggtgttaatgatgcaccaagtttaatggctgctgatgttggtatcgctatgggtgctaaaggagcaactgcagctagtgaaagtgcggatgctgttattatggttaacgacatttctaaagttaatgatgctgttgctatctctaagcacacaatgaaagtagcacacgttgatattattacggctatttgtattgttatcttgattgaattaatcgccttcacaggtataattccagcattttggggagcaattttacaagaagtagttgatttaatcaccattttattagctcttcttgctattgttattctgatcacggaatttggaggaacaatatgaaactcaagaaaaaatatttatttaaccatatttttagctaaactaatttttagttaaatatttttattagtggttgggttttataaaaactttcaagatttgcttatttgggtcaataagtgcttgaaagtttttttattttgtcacaaagttatagaaagctagaagaaaatgcactttttaggagaattaattttaattctgctggctacaacgttattaggacaattattttcacgtcttaatatgccagcagttattggacaattattatcaggaattttactcggaccggcaattctaggctgggttaagccaaatgaaattgtctccctcttttcagagtttggagtaattctattaatgtttttagctggtttagagagtgatttagacttattaaagaagtattttaaattaagttttactgtcgctggcatcggggttgttttacctgtatttttcacggggatagccagttacttatttgggatgcagttcctcgaagcactattcatcggaattgtttttgccgctactagtgtttcaatttccgttgtagttttacaagaagctaaccaaatccatactcgtgctggtactgctatcttaggagcagcagttgttgatgatatcttagcagttattgttttaagtttatttactacttttagtcatgaaggtggaaaaagtggtttaacgaataactttttcctcaatttacttattgaagtaatatactttgttgccgtttgggttgtcttcaaattcattgcaccacattttatgaaactagctgaaaaagtggaagtcgattatgcagtagttataggctccctagttctagccctcttaatggcctgggcagcagattttgtaggcttaagtgctgttgttggagcattctttggtggtttagcaattagacaaactccacaatataaggaagtccaatcttctgttagtgcaattggttactccatttttatccctgttttctttgtaaatattggactatccatgacatttgctagctttatcaaagatatctggttcattattgttatgactatcctagccgtattatcgaaattctgggctggtaaatattcaagtgaattatttggttttaccaagaatgaaggaaatattgtcggagcagggatggtatcacgtggtgaagtagcgctgattgtagcacaaattggaattactcatcacttattcccagaagacatttattcaagtttgattttggtaattattattaccacagttctttcaccatttattttgaactactatattaagcgtgaagtaaagaagaactaataaaaacgaggtcatcatgacctcgtttttttgtatttaatttactttaatacttcctagagatgtattggcttctaatacattttcagtgttactgttattctcaaaagaatctccccgctttttgccaccaaccgtaattttacccaaagaagtatctaaatcatatccacttgcattacatttattaacctcaatgtttcccttagcggtatcaaaactgactccttttcgtgtctttaattctttaatagaaatatttccattggctaaatcaatatctccattcttagttgccaaataatcagcactgacattgccatttgcactctcaatatttaaatcagtcaactcttcttttggcatttcaattataattttagaatttaactgcttaagattaaacacatttacatgaacaccaactttagaaaatgaaatctttaaatttccgttctttactttaacgtcaggagcaattttttctaagccagaataactaacactatatttactactagttttaaaaattatatctcctgttggaatatctacacttaccttattaaatttattaaaagaataagcgtaatttactatttttttatttgtcctattaaacattactatccctccgcctacaattacggcagtaatgattataattaaaaatatttttttccaattcattaaatatagtcctctaaatctaatattttgtcgtatctatttaaatcatctttttcataatgatgaatcacttcaataaaagttaggtttgaatttaataagtactgatgaataagctcagacgtttttttatcaagagaagcattaatctcgtcaagtaataaaacaggacgagccatcaaaattgcccttgctaattcaatccgcgctagctgtccacccgacaatttatctgcttcttcacccaattgataattgagtcctttttctttaatgagatttttcaaatctaacttattgcaaattttctctaccttttcccaggaaatactttctcctaaagttagattaaacaacaaactatcagcaaaaatcactggtgcttgacttgcatatgaaaacaagcccgaaaagttacctgcatttgtctttttgccgtttagtttaatttcttttgcttgtccatattttccatataataaaaattgtaacaaggttgattttccggttccagacggtccaataatcgcaatcttctctcctgatttaatctctatattaaccccagtagctaactgctttccatccctctttaaagttaaattttctatactcaaatcctgcaaacgtactgttttgctacctttatgatctttttcattatttaaaaagtgatctacattctcaactatttttttagtagtagctagcttatttcgatcatctaaaatgtataaaattggatttacaaaagaattggcaagttgcacaatagcaaacaatgctcctaaagttgtttgtctttttacaactaaatatattccaaataagaatggcatcaaaaaagtaatgatatgtgcaataaagttgatccatgaattagtatcaagattcaataaattcattctgcttaattcttgttctaatcttgctacagtttgcttattcttcaatactgcttgcctttgaccaccatatagctttagagtttcaacaccagccaaaaaattctttgtttgattaacatatctactatttgccttagtccacttttcagaagattcttgaattggtttttgaaaaatattggaaacaaacatcggaacaaaagaaccaaataagaataaaagagtaattaaccaattaacagctagagcatatcctagagctaagatcaaagaaaaactttgcataataatttcaatctgcgcatcaaaacgattagtttctagcaatttaaaatcattagttagaaatcctaagctattattatttttatctttgtcttcttctaacataccaccaaaaatacgagttctaagataaatatttacctctttaataatagttgtttttaagcgattaaatgataaactcgcaactaatgtaacagttaaggcggttacaatcacgactaaaaactgtgtaatcttatcccagctcttattgctagcaatattagtcagagtttgaacaatgttggccataataatattttgaaaactggcaatcaaacctaagacaatcatcaagataaacttgaatttatttgaatacctaaatagcatttaattatctcccatcaattaaatttgttgataagagtatatgatgagataatacttaaaaataaatctcttgcagatctgcaagttaaatttcgaggtaaaaaatgtacggtcatgaatttaaagaattacgtttagaacaaggtattacacaaaaagaagcttgcaaaggtatttgttccgaatcaaaattatctcgctgggaaaatgatcaaattgaagttgcgttcagtacagcaatgaggttattgaacaggattcacattactagtcatgaatttatgggatggtcaaaattttcacctcaacctgaaacagacaaagaagtaactgaggcctggcacaaagaagagattcctttgattaaacatgttgctaaaaagcagctcgataaataccaccaatcaaaaaatccttttgatcttttatcaaccgtagctttatttaaccagctggtaattttagaaaatcataattatcttcccgaagttgatcaaattaaattagctaatattttttcgaaggtggtaatttggtcagaatattatttagcacttttcgggagttcaatctttcttttaactcccaaacaagtatatggaatttctaaactagttttaaaagatgttagccgaattactgaagctaatacaacctatgacttagaggtaatgcttggtgttctgggggacgctactattaaattaattctaagtaatgatattaaacatgctacttcactaattaaagagatcaaaaaaattgagcttccgcattatatgatgtttttcactctaacatttaattatttagacaagattgcaaattatgttaccacgaaaaatgaacaacctattttaaatttgatcaatacgatggttcaaataggttgcccgattcaagcagaaatatatttagatgtatttaaacaagttaaaaacaatttggatagaaaaacgaggtcatgatgacctcgttttttactattctacttaaaagtaacggtataagtaacatgcttcaattatgaagataattactaaatacccataccactcaaaacttacaactggattattaaattccaccatacacataaaactacaaattatagtgcctaataggcaatagataaagggaatttcaggctttacaatctttcgttttaccattacgcatagaagaatgccaattaaacacaaacctagaaaaatccaaatcataaaaaccacctatactttagtgatttgctccctcaacggccttaatatcgcccttaccatcacgttcaacaattgcactaagtgcagctgttaatcccttaacaatatcaccaagagccatcgatggagtattaggacgatttacaacttgttctggcaagaaaggaatatggataaagccagccttaatatttggaaattccttgtctctcatatattgaacttgatacataatgtgattacatacataagtaccagctgtatttgaaacactagctggcaaacctgcatccctaattgcttttgcttctgccttaattggcaattgtgtaaagtaggcagtttctccatcttcatgaattggttcacctagtggctgatagccttcattatcaggaatacggccatcattaatattaattgcaacacgttcaggagttaatccaaaacgaccaccagcttgcccaacatttaaaacatagtctggcttttctttttcaattgcctttttaacaacttcagctgacttattaaagacagtcggaatttccaatttaataatttcagctccattaatttcagctggtaatctctttaccgcttcaattgcaggattaattttatctccaccaaatggatcaaagcctgttactaaaattttcataattttatcctttcaataattaaaatgctaaaaagtacattaagccaatttgaacaattaacaagataacggcaatcggagcttgttgcttaataacacccatctgatctttcatctctaaaagcgctacgggtaaagtattaaagttagcagccattggagttactaaagttccacaataacctgaggtcattccgattgctgctacaactacaggattagcaccttgtgcaattacaaaaggaattccaattgctgcagtaattaccgcaaaagcagcaaaagcattacccataatataagtaaataaggccatcgcaatacagtatagcgctacgcctaagaagtgatttccagctgggaaaacatgactaatcatgtcggctgttaacttaccaacaccacaagtcgtaaaaacaaccccaagcatggctaatagttgtggtaaaacgccaggtgctcctacgcttctaaccattctctgggaatccttgaaaacttgctttgctggcgctttagtcaagataatggctaagactagtgaaacaactgcaccaataccaattcccacctgaccaccaagtggagtaaattgtgcaattataatagatgttaatgccaaaacaatgcttggtaaaaatacctttgctcctaaacgtttagcatcttcttgagcagttttaggatttacagttggcaatttaccaacctggatttgcttaaacaaagctaaaattccgattactaaaaccattgcaccggacactacggcaggaatcaaatctccaaaagcaaaaataattgctaaaaagaaccagaaaattgctgttccaattcttgctttattagttttgtcacgcaatgtttcaattccagcaattgccatacataaaccaattaatgcataaagaatggcaagtaaaaagttaatcgtattttgcatattattttccttcccatttagccatttgacggtcaaagtataggttataagcaaaaactaaaacgaaagtaataatcgcaataggaatcgtgttaacaacaattcctactggatcaaccttataaccaagtgatttcattgttgaagaaatcaaaagtacaccaccagatgctacaaacaagttttgggcaaaaaagttaccaaagttgtcaattgctgcactgcgtccctttattagatcaatctctgattcgcttagtttctttttatcttgatcttctgcagcagcaattaccatcggtgcaattaatggacgaacaaattgaacctgtccctgcaaagaaatcccaaatacaccagcaagttcacgaattaaaagatagatatttaaaatctttcccgcagttaattttttcagtttttttattgcattaaccgtatagtctcttaatccatgtgattctactagcccaatcattggcaaggttaggaaaaacaaacttaccattcgattttccacaaaactctttccaattacttccaacaatttaacaaaatccatcccagagaaaagtcctgttacaattgctgcaataactacaactgcagtcgtgtcccacttcaaaacaaagccgactacaattattaatattcctaacagctttaaatattccatactacctattccttaaataaaaaataaaaaaatactataaaaatattatacaaaatgcaataaaaaatacgaaagggaaaaaccattcgtatttcaatttctattcaaattagttaatcaacaaataagtagctgccccaccttactggttcttcaacagtaggtagcaataagaaaataactacaataatccagccaaatggaataataattaaccatagccaccaaccactatagttcgcatcatgtagtcttcttactgcataacccaaaagacctaattttatccaaactagtaagatgaataaaattaattcaattagccaagttaaaaatgtaatatgtgatacagcccacgtcacattatttggagtaacagagaaaattccactagtacataatgctagtattgaagctattccaattacaattgttaataagaactgaataacaaatgcaacccaaaaagcttttcgagtactacgcgctgcccaagtgaacggatagagaaataatcctttaaaaatttccccaactgatggatctggaatatcactttctggtgcatgatattcttgttcataataaggtttatcagacataaaatttacctcatactaatttctaattattttctgcttttgtaattagtttatcaaaattttgatcctgatgttttttagctaggtcaggtgtcttccagtaaacttgatccgttattttcccttggccactagctaaaataactaccggatgaccgtccaagattgtataaccataagacgtttggtgttcatctttagctgtccaaccaattaacgtaatataattgaccccttttaaagcttcagtattattaaagactttaacccaagtatgagtatcgttcagatagtcattagaaaattgttgatgcttttcaaaatattctttatctgggatatgaatctcgtattgatgatcttccgttgtgagcgtatgagcaccaaattcaatttctcttaattgattatcatctttactatgtgtacgacgattattatccatactgtaccactcaccctgcagttttgcggggacagcatataggcctttatctccagcaatctttttagtttttactcgctgtctttctttcgtctactactttgacatttttaatgatcttatttactttattaccgtcgttatgattgttgaggtacttaatcatcattttaatatcagatgaaccaacttctttatttttgtgatagaagaaaatagttgggtcattcttggtgtagtagaaatatttgtctccattaactgtggcaatctcatatgcaacatcactgccattttgcatatatgaaaaatctttccgattatgaaggcgtacagtcacagtattattttgagcttgcttaaaagtcttcttccaaatatttggatatttttcaccagcatatgcaattgtaattgccgtttgttttttagtattcatattagttgctgtaagcttactactcttcttaactgttgttgtcttctcagttgatgaactagaactattattttgtgaattactacatgcggttaacatcgtacaacttaacaaaccaattaagccaattgaaactaattttttcatcatcgatacctccaaaataagttacctctcattgtctattaaaacactctgttatttatttcccaagcaatatcttcctaattattagactttgtttttcttgttttttatactaaaaatatggaacgagaaaagaggcaatcaaatgctaaataacatccataatttctttaatgcctttggggcaagtgtcattgtccctattatgatttttatcatttctttgtttttaaaggtaaaaccaaagaaagcaatgatgtgtgcattttatgctggtgtaggtctaactggtttttcttggattattaatgaatttactccagtagttactaaaatagtccgtcaaatggttaataataccggcataaagctaccagtcgttgatatcggttggcaagctggagcattagcgagttttagcgcaccaattggattaactttttttgtattcggactagtggctgaatttgttttatttgctattggaattacaaaagtttttatgccgtcaaatctttggaacaactttggtttcatgatttggggaactcttgctttttatgtaacacataattggtggatttctttaggcttatctttttttatgcttctctatacattactgctggccgaaattcaggcagatcgttggtctacgtattataagattgacaataccactgtctgtgcacttcaaaatattgttcaaactattccagccattttgttagatccactttggaatttacttggttttaataaagctaatttgactccaactgcatttaaaaataaatttggtgtttttggtgaaccaacgactttaggagccatcttagggcttttaattggaatattaggtaatattaaaaatttagccacagtagcagcatggggacaaatttttcaattctctattcagctttcagctgtcatgacgattttccctttagttacaaaagtctttagtaaagcattcattcctttagctaaacaaattaaccaagaacgtaaacaaaataaaaatacaaaatcaggaattgacttaatacaagatagtaaacgttggtttttagcagttgatgatggtgtcggttacggagaaccagctacaattatttcaggaattattttaattccaatcatggtagtcattgcttttgttttaccgggaaataaaactttacctgttgttgatttaattgctctcccttacatggttgaatcaattgtcgctattactaacggtaatattctcaaagtcattgcaaatggagttatttggtttagtttagggctttatgcttcaagctggttaggttctatttacacaaatacgatttctcactacggagctgctattccagcaggcatcgttttagtcactagctttaacttaatggctcaccccttgaatgcagcagtgtttgccgccttcatctcaaaaaatcctttttggattagtttgtgcattattatttacttagtactgctcattgtattaagaaaatatcgtccacagatttggacctacttaaataaaatggctgctaagaacgtgcaagcaacatcaagccttaaagcctctaccaaagagtgaatttgttacaataaaaaatgaaagaactaattaaaaggacgtgaagtttaatgtcaaaatttaattggaaaaatgtattagtagctggaactgctgctggtgttatctcgggattagttaaattgggctgggaaaacattctccctccaagaacaccagaaagaaataagactaatcctccacaaaaattactagagcaaatgggtgttccagcccacttaactcatgcaacttatacttattcaggagaaaaactaccttgggttagttatcttgttcactttggtttttcaatttcttttgctactgcctatgcggctcttcttgaaaagaaagttaagtggttaacaatagatcagggcgttccatttggcttaggagtttggatcgcttttcacctagtaattatgccattaatgaaaactgtcccttctccaaagaaccaaccaatggaagaacatatttctgaggctttaggacatatagcatggatgtggactaataacgaaattgctgaaattgttttacagcaattaggacaaagaaaaaaagagcattaatgctctttttattttgctataaaattgacaggatattgtttaacatatgagtcaaaatcgaatatcttacatcttttgtagtgacgtacgtccaagctaggatcattcccattacccaatataaataaataaatttactaaacatcggatcatgtccataagcaaaaataaaaccacttactacaattccaacccatttattaaatacattttctactgggaaaaatgtgttgaaaaatagcgctctaaagataaattcctcacagattggtgccactatcactaataaaacattgaacattggcgaggcaacttttctaattgcatctagttcttcttgattctttgaaattgtattaccaccaaataatcgcacaaaggctatttggaagattactaaagtaaagaaagccgctacagcaataataattctttttgtatcccagtgaggcttcgcattgaaaaaccaatcattttcttgtttaagttctcgtttataaatccaatacatccaataaattactgcaacagttaaaactgccaaaataaccgcaaacaataggttaactttcttttgtgcataacctaattgcaaaattgtataaaatacaaaagcaatgatcactgttgctagatttcctaaaaagcgtaaaaaagtcttcatccgaacacttcctctaattgaaattatttatttcttttcattataattgtttattaaaaagacataaggacatttaatcatgcaatcacaactcatgcaatctctgcatcaattttttaactttattgttcataatcaagtaacgattacctctttgattatgttcgtattttttattttatttttgctttcttggctgattgaaccacgtcgtttaatcaatggccttattttcacaatatttgggattagttttttagtatggtctgctattttaattatttctcaacacaatcctttactaactacctcattttctttccttgctttggctatcttatttggaatctttttcttagtaaccttttcttggattttctttctctggaatgcctattttgtctggaaatatgaaagccattctctgccaaatcttttaactttgattattggtttatttttagtaggaatatggactttaaatagattaggtgtatttcaccgcctaccggactggcttcattctctagttgctggagcaactttgattgccttttatcttctatttgtaatgtataactttttactcaatttagttctgtatcaaattactcctcgtcgctacaagcaagattacctaattgttctcggcgcaggattaattgatggaaagaaagtatcacgcctgttaggtgcacgaatcgaccgagctattgctttttctaataaacaatatgataaaggacataaacgtcccaaactaattatgtcaggtggacaaggaaaagacgaggatctctctgaagcagccgcaatgaaagattacgctgttaaacatggctacgatcctaacttgattttattagaagataaatcaactaatacctaccaaaatatgctctactctaaaaaagtagctactagtgattggggaaatccaaactttaaagctaagttttttactaataactatcatctttttagagcaggcctttatgcaaaaatggctcatttaaaggccaatggtgtcggagcaactacacgtttttattttttacctaatgctacaattcgtgaatttgctggggtctttattatgcataagaaacgccattttgttatcattggtttaattgcaattttatttataatccaagcaatatttgcagtattaggctggggcaaatatataattgcttagaaaggaaaaaatatgctacaactcttacacttaaaaaagacctatcacgtaggtgacaccgtcacacatgcattagatgacgttacgattaattttcgtaacagtgaattcgttgctatcttaggtcctagtgggtctggtaagacgactcttttaaacgtaattggtggattagatcattacgattctggagacattatcatcaatggtaagtcgacgaaaaatttctctcaaactgactgggatgcttaccgcaataattctgtcggctttatttttcaaagttataatcttatttctcacctttctattattgaaaatgtagagcttggtatgacgctctcaggcgtaagcagtaatgaacgccacgagaaggcaattgcggcgctaaagcgtgttgggctaggcgatcatttaaagaagcgtcctaatcaactatccggaggacaaatgcaacgagtagctattgcccgggcaatagctaatgatcctgatattcttctatgtgacgagccaacaggagctttagatactaaaaccagtgaaagtattatggagctaatcaaggaactcagccacgataaattagtcatcatggttacacataatcctgaactggctgaagaatatgcaagtagaattgtccatttccaggatggaaaaattcttagtgattcaaatgcctttgagcctaaaaaagaagtaaaggatacttttaaactcaaaaagacaaaaatgtcttactggaatgctctaaaacttagttttactaacattatgactaagaaaggtagaacttttttaactgcctttgcttcaagtatcggaattattggtattgctattgttttagctttgtcacatggttttcaaaaacaaattaatgaaacgcaaagtaaaacactagctaaatttccaatttctatttctcaaacggcaacagatatgaacgccgctacaagccgaactgaatctgacaaaaatgtcaaaaataagggatatctcgttgccgcaaaaccagacaatgagaaaaatacgcatgaaaataagattactcagtcttatatcaattatgttaagaaaattaatccttcatatgctaacaacatctcctttattcgaggaacccagcttaatcttttaactaatgataatggcaaaattaagcatgtagaattttctaatgttaacaactctggttctgctattgctagtgctcaacttcaaggaatgaatagtgtagggattaacacaagtgtctttcctaaaacacttgattcaaagcaaggaacttttttaaaggataattaccaactacttgctggttcctggcctaagtcaaataatgaagtagttcttgttttaaataataaaaatcaagctaatattaacgcacttaagaatttaggtatttcaattaaagatggtcaaaaaattgatctaaacaaacttgtcggccgtacttttaaggtgattagtaacaacaattactatcaagaattgcctactggaaattttgttccacaaaaagcttctaaatcaatgtatgattctagcaacttaaccttaaagttaagtgccgttattcggggtaaaaataatagtcaaatggctctgctagataacggaattgcttacagcgatggcttaactcaagaaattattaagcaaaatgaaaattcgaatattgttaaggcacaaaagaatagtactaccaatgtaatgactaatcagccaatgaaccaaactcaaaaagagcaatttattgcatctcttggtggttctagcatccctagcggtattcttatctatccaaattcatttaagtctaaagataaagttctcgattacttagacaaatacaataaaggtaaagctaaaaaaagatcaggttatctacactgatatgtcaggtactgttactaagttaactggtggtctgcttgacggaattactgacgttttagttgcttttgctgctatttctttagttacttccatgattatgattggtattttaacttatacttctgttttagagcgtacaaaggaaattggtgtgctaaaggctttaggtgctagaaaacgggatattacccgtgtctttgatgctgaaacctttattctcggcctcttttctggtattttaggtatcttaattgcttacttatgcactttcccaatcaatgcagtattatacgcaattactaatatgagtaacgttgcgcaactcgaccctatgcaagccttaattttagtaattattagtactgttttaacaatgcttggtggtcatataccagctcgaatggctgctaaaaaggacgccgcaattgctttaagaagtgaataagtctataaggatttcaacattgaaatccttatttttttgctctaaacttacctaagaaaaaagttatgaacttattcttatattttattgaaaacggcatcaataaagtatatgcttaaggtaacatatgttatatatgtggaaatagaaataggtgaatgaaaatgttatcgggtgtaacaatgttagatcttgcccgcttccaattcgcaatgactacagtcttccacttcttctttgttcccttctccattgggatgggattcattgtatcaatcatggaaacactctacgtcgttaaaaaggacgaagtatataaaaagatggctcaattctggggaaaaatttatctattgagctttgctgtcggggtagttacaggaattattcaggaatttcaattcggaatgaactggtccgactactctcgttttatgggtgatatttttggtgctccattggccattgaagctttgttagctttctttatggaatctaccttcattggtttatggatgtttacatggaacaagtttaagccagcattgcactgtgccttagtttggatttcttttatcggttcaatgctaagtgcaatctggattttaactgctaatgcctttatgcaacatccagttggctatgtcattaaaaatggtaaggcacaaatggctagtttttgggctttaattgccaatgaacagctttgggctagtttcccacacgtagtaatcggtgctattgttacagcttcatttgtagtaattgggatggctgcttttggcttacttagaaaacgggacgttaacttccacaaaaagtccatgcgtattgctctttgggttgccttatttgcctcaattgctgaaattggtgctggtgactatcaaactcaagttgaaattcacgaacaaccaatgaagtttgcagcaactgaaggtgtttatgaaacaacaggcgatcacgctccatgggatatagttgctaatttaaatactaaagaacataaaaatgaaggtgcaatttctattcctgatgttctaaccattcttacttatcacagtactagtggttccattaaaggaatgaatcaaatcaataaagaattgcatgcaaaatatgataaaaagtttggcaaagacatgagctattatgttccggttaagaccttattctatagctttagaatcatggccggttttggtgcattatttgccttgcttgcaattttaggcttaatttggactcgtccaaagaagaatacaattgaaaacaagcgctggttcttatggattttaggtatttcaaccttccttccatttattgctaatacttgtggttggttcattacagaacttggtcgttttccatggactgtctatggcctatttacaattgcagattcaatttctgcaagtacaaccactggtgagctctggttcacaaatattatgtacttcctaatcttctcaactcttggcggagtaatgatctattactgtaaacgtcaacttgatatgggtgtagctggtgcacttgaaaggggtgcatactaatgatcgatggaattgattttttacagttgctttggttcctattaattggccttctgttcatgatcttctactttactgaaggttttgactatggtgtaggaatggcaacacaatttttagcaaaaaatgatcaagaaaaacatgtaatgatggaaaccattggaccacactgggatggaaatgaagtatggcttatcacagctggcggtgccatgtttgcgtcattctctgattggtatgcaagtctatttagtggatattacatcttactattctttaccttatttgccctaattatcagaggagtatcctttgaattttctgctcatgccgaaactgaacatggatttagaatttggactagtgccctattttggggtagtttattagctccatttttccttacaatgatgttcggtagcctaattcaaggtgttccaatcgatgctcaaggaaatatgagtttaagtttttggaatattgttaacccattatcagtagttgcaggagtagcaggagtgctcctttgcttaattcatggaattaacttcttaagattaagaattgatgatccagaattaagtaagcgtgctgctaacttaaacgagaagctctatcttgtagcttatttaggagaaattgtctttgctttattgattttcttccaaactgatttctttaagttaagaccaatctcttcaacaattatcactttacttattgttgttctaactgcttggtcagatattgccttaattaaaaataagcaagcagcagcctttgtaacgagtggattaactttagtagctgttgttgggcttttattcaatggactcttccctcgcgtattaatcgctactgatccagcacactcacttttaattaaaaatgcagccaactctaaactaacacttgaggtaatgacaattgttgctctaatccttttgccaatcgctttagcttatatcatctggtcatatgtagtctttagacaccggattaaggtaaatcaaaacgcctaatctagaacaggaatgaaaatgattgataaacgactttttaaattaccaaaagccaaaatcatgctcgcaatgcttgcaggactaatgttcttgcaagcatttgctattttaggacaaggtattttccttgctcgagcaattgtcggctcttggaaacgacagtcttttgctaatattgcagaagacgttttaacttttttgatcttctatttattaagacagggaattaactggtttcaaaaatggtatatgaaccgttacgcaaatcagacaactgctctcttacgccagcaattacttaataaaacctatgatggtggaattgcattagtctccagaattggaacaggaaacttagtttctactctcttagatggaatggatgagatttccaactatctgtcgctaatttttccaaaattaattgccctagcaattgttccatgggtgattttaatttatatctttactctaaatgccctctctggatggattttactcttagtttttcctttactgatcttatttatgattattttaggaactgctgctcaaagtaaagctagtaaacagtatgctggatatattaaattgcaaaaccactttgttgatgctttacgtggcttaagcaccttaaaagttttgggtcttgctaaaaaatacggaaatattgtttataaaaatagtgaaaactaccgtaaaaagacaatgggtgtcttaagagtagcaatcctatccacttttacgctagacttctttaccacattatccattgcgatgattgccatgtttcttggaatcggattaattaacggaaatcttcttctttatccttcattagtgattttaattttatcaccagaatactttttaccaattcgtgattttggtaatgatttccatgcaactttaaatggtaaaaatgccttaggccaaatttttgatattctggcttttccaactactcctcaagaaaaccaattatctagtttcacgtggaacaaagatagcacctttatagctaataatgtttctttcaactatagtcatatcgatcaagatcattttagtgttaataaaaatgcaaaaatgagtgccgtagtaaaaaaagaacaagcaagtacagataagactcatacagctgatgagttacgtaatgttaatctaaatcttaccggatttcaaaaagttggcattattggcccaacaggtgctgggaaaacaacattaatgagaattttagctggctttcttactccccaccttaaagaagataattttacaattaatgggcaaaatcttgcccaattaaatcaaaagaattggcaaaatcaaattacatatattccacaagatcctttcatgttcgcaactagcattaaagaaaatctaactttttataatccaaatgctagtcaaaaagaaattgataccgcattaaaagcaactgatttgaataattttgttgctagtttaaaagatggtttaaacactagaatcggtgaaaatggacgcggcatttctggcggacaaaaacaacgcattgcattagcccgcgctttcttagcaaaagatcgaaagatattatttttcgacgaaccaactgctcacctagatattgagactgagtatgaattaaaggaaccgatgaagaaattaatggaaaatcatttggtcttctttacgacacaccgcttgcactggctaaatgacatggattggtgcctagtcattgaaaatggagaaattgtagaacaaggtacccctagtgacttagctaaaaacggaactttattcaaaaaacttactcagccattgaaagaagacctactatgatgaataaaaaattttcttggaaacatgaacattgggttaaaccttacctcgcaaaatataaatggaattttctcttagcgatttttcttggcatcactatgttcttttgtggtggtgcgcttatgttttatgcaggctatacaattgacaaagcggcgacacgtccagaaaacatcttaatgatttatgttccaatcgtcttaatgcgtgctgtcggaattggacgaccattatttagatatttagagcgcttagtctctcataattggattttacgtgtcacaagttctctaaggagaagacttttttatattgctgaaaaaaatacttcggcggtcggatcagcctttcaaacaggaagtattctttctctcctaactgatgatattggacacttacaaaatctttatttgagaaccatctttccagccattctaagttacctagtaggatttattgttataattttgattggtttattctcatggcccttagctggtattatcgcaattttattgattatggaacttattctcgttccattcttctcacttttaaaacaagctagtgtacgcagtaaggaaaaaaaagagaaggcacagctttatacagaatttactgatcaagttttaggtgctggcgactggaaaatttctggtcgcaaggatgcatttttcaatcaaactaaaaccactttaaagtctttagaaaagcatgaaaaaaaatccggcaagtttgattgggcacgtgattttgtccttgagtttatcttcggtttaatggctgttgctattctttatttcactaacaagaacctcacctataatcaagaagcagcaaattacgttggtgctgttgttttagccttgttccctctatctgatgctttcattcccgttggacaaggtattgaggaatggcacacctatagcgattccgtaaaacatttaaatgaattaacagtacctgaaaaccatttaccccatcaagaatatcttgacccagtttttgcaggaactttaaaagctactgatatttcattcacttatcctggagaagattatccaattattcaaaatttctctctcacattaaaaagaggtcaaaaagctgctctaattggaccatctggggctggaaaaagtactatcctacaattaattcttggagatttaaagccaaatacaggcactgtcactttggataagattaatgttttgtccttacaaaaagagcgttcaaaattattctctgtgctgaaccaggaaccatttttattcaacactactatctatgaaaatcttaaaatggctaatccagatgccactgctgaccaaatgatggaaattttagaaaaagtacagctagctgatttcattaattccctccctaaaaaactgaatacagaagtcgcagaagctggcgcacgtttttctggcggtcaaaaggaacgtttagcattagcacgtgtacttttacaagatacccccattgtcctcttagatgaaccaacagtgggtctagatccgctcacagaacaaaaattattaaatttagtatttgatgttttaaagaaaaagacagtagtttgggtaactcaccacttacaaggtgtaaaatatatgaacgaagttctcttctttaaagatggaaaagtgaccatgcagggcaatccttacgaactatttgaacacaatgagcattttcatcaactttatttaatggatcaaggactaatttaaaaatagaaagaagtttattatgtctgctgaagcaaagcaaggctactatgaattagttgaaccacgtaccctatttaactccataattcctgtcctattaggaatcatgtacacagaatataattttcagttgtttagaatttttccaacaattgaaatgtgtattgccacaattgttctacaaattttcatgaatgtgaatgatggttattgggattataaacgtgaaaaagctgctaaaactggcgatcataaaaagaatccgattgggaagtaccatcttaaccccaaacatgttttagttcttatttggatcctatttatcatttcagctacgtgtgcttttatgattggttttcaaactaatttatatatttggattctaggaattatttgttacgcaatcgctatttcctattcaacaggatctcatacaatttctgccggaccttttggagaaatagctgcttgttttgcaatgggatttggaatttttctaattatggtctacattaatgtgtatccccatgtaccatttaactggaattttgtttggccaattatccttgctgccggcattcctgaaatttgtaacttcactttaatgcttggaaataatctgtgtgatcatgatgcagatatcgcaaatggaagacatactttagtttcttatattggaattaagggtggactttacttattcgtatttaactacttacttggattctttttaacaggttgggcaatttgggttggagtccttccttggagcgtcgctttaattttgatttgtattccaacaatctacaaaaacatgcgctttctttggaaaatacaaactaagccaaaatctttccctaaagtagttcaaaatacccaagttttatttgtgaccgaagccgtaggtttctttatcggtttgatgttaaatcttagaattaaatatccttttgatccagatgttaatcatctggattttttattgtttttaaattcgtactttcagtatgcaaaattattgattttactagttttatttaataaaacacgaacaatatttttgatatattacaaaaatatacatgttttctattgaattcacgctcatagtttgctatctttatatcgtcaacttcattaaatagtttctggaggaaaaaatgaagataaagaaatttttaatcggcgctgctatggttttacttgctgcatcaactgctgcatgttccaacaataagtctgcttctaaaacaagtgatggctatactcctaaagaattaaacgttcagtttgttcctagtgtccaagcttctaaacttgaagctaaagctaagccattacaaggcttgcttgaaaagcaattgcatatgcctgttcatgtaactgtttcaactgataactcagctttagttgaagcaatggcatcaaagaaagttgatgtcggtttcttaccacctgatgcttatgtcttagcccacaaacgtggtgttgctgacgttttgctccaagcacaacgctatggctatgacgaaccaagcggtaagcaaaatcacaaattaatggatagctaccgttcaatgatcgtagttaaaaagggctctaagatcaaatcttggaaagatctaaaaggtaagacaattgccgttcaagatccaacctctacttctggttacgttcttccaattgcggaacttcacaagaaaggtttaaatgtaccaaaagattgtaaattagttcaagttaagggccacgatcaagctgttttatcagtttataacggtgatgccgatgctgcctttgtcttctctgacgctcgtcctcttgctgctaaagatgcacctgctgtaatgaaggatgttgttccaatttactttactaaatacattccaaacgatactgttgctgttagaagcggcatgtctaagtcatttagaaagaaacttgctactgcctttaaggatattgctaagaccaagaagggtaagaagatccttgaaaatatttaccaacactatggttatgtagattctaaagattctaacttcaatattgttcgtgaatacgaagctgaagctaaaaaggctgaaaaataaatttaatatttttaaaagaccaccctactttgacttgtaggatggtctttttctcgtttaaaattagaatagatttttaatcgaggttttcaaatgaaactaaataaaaaatttaatctattattgatcacaagtgctatctttttaatagcaagtgcttgtagcaagcctaatcatgaggaaacaataaataaaaagacagacaatcatatcgctctgatatctgacattaacggcattaaagataattctttaaatcaatctgtctggaatggtttaaaagattatggtactaaaaatgatcttccagaaggaaacaaaggctataactattttgtacctaaagatccgaaaaactatcaaaccactatcaatgaagcgttagataaaaatttctcaactattattggtgttggctatactcttaagccaaatattattaaagcagctaaaaataatccgaaaaaaaattttgttgttattgatgcccatactccaaaactaaaaaatttaaccggtatctcctttaagaatcaagaaggagcatatttagctggtgtagcagctgcttacacgactaaaagtcaaatagttggtttagtcttaggtcaaaatagtaaagaaatggcctcattcaaagcaggttttattcaaggcgtaagaacaacaaatcgtaaacttcataaacatattaaagtagtaagccagacagttggaaacttttcggatgctaataaagcacacgatattgcccaggaaatgtacaataaaaaagctgacatcatttttcaagcagcaggtaaaagtggacaaggtgtattcaaagcagctcaggaaatcaatcaagctcgacctgtagggcaaaaagtatgggttataggatctgatgaagatcaatcaaaattgggcgactaccttgcaaaaggcggacaaccatctaatttcactcttacttcagttatcaaaagtgccgatcttgctgttgaagatattgctacccaaactgctagtgggaaattcccaggtggtaaaactctgaagtatggtcttaaaaacaaaggtatttctttagttcaagggaatttatcctatcatacctggattaaagttcaaaaagctaagcaaaaaatcattgacgggaagattaaggttgatacagattaatagattgaaaaaagagaggtagttatttacctctctttttatttttatgaattaaagtcgtcttattagagcgttttaagttttcaaacaccttatctgaacaccgtgaaatataggcaaatactaaaacatctactacaaagagttgacttatcatcgatgtagtagcaccagacctaattttgggctccccaatatcttgggtaagtaatacaagatcagcttttttagctattgcagttctaggctgtgctgttagtaacacagtttttataccaactgatttccccacttctaaaagatcactaatttcagtcgtcattccctgattactgattaagattaaaatatcattaggggtaaagtttccaatttctgtagctgcaatatgaaaatcagtagtataggtgatagcttttcctaaacgaagaaatttctggtataggtcattagctactagaccggatgctccaacaccatatgctaaaatccgtgaagcctgattaatttcttttactagtttagaaattgttttttcatcgattccacttttagttatgtctatcactgacttaaaccttgtggccattttatcctttattgatgaaacatcttctccaatatctatttcatcatattcagcaggttctttgggtaactgtagtgcagctagttctaattttaattcactaaatccatcaaccccaatttcttggcagaatcgaacaatcgttgctgtactaataccagtatctttagataatttttgaatagaagactttataactgttttaatgttattacttatgtactctgctaaaaattgttctttttttggcatctgagccttcttagaatgaatgatatttaaaatatctgccatttttactccttcatggtacgaagtaagataaattcctggctaggctttatcaaattaatcaaaggtatatctttttctataatttttcctactatatttactttttcactagctggtaaatttaccttaagtatttgaatttctcccatataccgttggtacttatcattattgattgtaatatctccaatatatcttttgccagtattatttttcttaattaccggtaccggatgtaatctcgaatcttcacatctcactacatattcagctggatcaggccgctgattatgttttcctaatacataatcatataaatctttatctccattttcgcatttttttgtatgaagtaatatttgttttttatttttataagtatctatttgctttaacgaatcttcactaattcccccatccccgacataaactaaatctactcccatattttgtaattctaaaatactagctaacggactataataccgctgcttttcaagagttggcagtccctcgtataaaggacctcttaaattttcatccccagcaaaaaatgcctgagtagtaaagccatattttttaaacatacgaacttgctgctctaaaaactgctgactaattcctgtatcaggagaagggtaaaaattgaaccatgcttgcacgttttctctttttacatttaacaaaagcaattcttttaactcttcttcactaaaagtactagcatttatcccaatttctattaagttagacaactcagcaatttttttaattggcaatttatcatctattcgcaaaccagttataccggctttcttcaagttagggattgtatccattgatatttttaattttttcaaactactttgatcaatatcaaccattacactaagattctgttcttttgctatttttcctaattcttgtagattttgtttatagctagttatatcttcttcgggaatatgaatcgacgtaaagattccttcaaagccattatccttcattttcctaatatattctcgagtctcagcatcaatttttttatttaaatatacagaaaagcctaacatttattcactctttccaaaagaaggccaaaaagcatattactttttgacctccttctttaataattattaactaccgaactaatattaccgttacattctttcaaaatatccattgctttttctttatcaacacctgttttcaacatagtaatagcaactgcaacgttcatatctgctttttctaatgtatcgcttgctactgactctgaaacacctgtcgcaacttctataattctacatgctcgatctactagcttagaatttgttggcataacatctaccattacgttttcataaaccttaccttgtttgatcataacgcctgttgatatcatattcagaatcattttttgagctgtaccagccttcattcttgttgacccagttattacttccggacctactacagcttcaattgctatatcagcatattttccaatttctgatttttttacacatgctattgaaatagtaagagcttttacctgatttgcatatttcaaacatcctattacataaggtgtacgtccactagctgcaagcccaattacaatatctttctcatttaatttaaggtcctttaaatctttctctcctagttgtagatcgtcctcggcaccttctacagcgcggaacatagcactttggccaccggcaattaatccaatcgctctttcaggattgattctataagtgggaactaattcaactgcatctaatattcctaatcttccgctagttcctgctccaacataaattaatctcccaccctctctatatctttttgatgcatattcaatggctttggcaatttctttatcttgagtaccaactgcatctgcgatttttttatcttcttggtttattattttaactatttcaagaggagtggcgctatcaatgtgtagagactttggatttcgttgttccgttgttaaatctttaatattcatttttatcctcacttactagttatctttaatacgggcatatcggccttaacggtacctgtagcaattagcttaaaattagaaacatcatctatgttagtaatagtcataattacgattggatcctttccagcttcttttatttttccaatatccatttgtgcaacaggttgtccggcttttactatgtcattttcttttactttgatatcaaaaggacggccctttagttctacagtatccaaacccatatgcaataagatctccaaatttcctttagttgattttaaagttaaggcatgttttgtagacattacactaactacttttccatcaacaggagcaacaattttcccatcttttggaataatagcaaatccttctccaagcattttttgtgaaaatacttggtcttcaacttcatctaactcttcaatttgtccatctactggagcaacaatttcttgtgttgttaatttagcgttatcttttacctcattttcacctgaagtagacatattcaaattatatgcttgctcctcagcttctcttcgttctttaacttcagcatcagcctcatctgcaggaagcatagcctctttcggaacaccccagaagtaagtagcaataaaaccaccaacataagaagctaacaaacctaatatataagcccaccacatgttatgagcaattaatggaatcaaggctacacctgaaggcccgatagctattgagccaacttgaccaaaagcagcaactacagcaccaccaataccaccaccaacacaagcagtaataaatggacgtcctaatggtaatgtaacaccatagattaatggctctccgacgcctaagataccaactggtaaggcacctttaatcatatttactaattgtttatttttacgacactttacccataaagcaattgcagctcctacttgaccacctccggccatagctaagatagggagaagaggagtaaatccaagtttttgaatcatttctagatggataggggttaaaatttgatgtaaacctagcattaccataggaaggaagaataatcctaaaataaatcctgagattggtccaccaacttttaacacccaattaattccacctacaagagaattagaaaaccatcctgccaagggcataattacaaaaattgtaaataatcccattattagtattgttaaaaatggtgtaaaaataatatctacagagtcagcaatatgcttatggaaaaatttttcaacataagataatagccaaacgcctaataggacaccgataataccaccctgaccagcagctagaggttttccatcaaaaatattaggaatgcttactggagcaacaatcccaggtaagtaaacaataccaccaatgataccacccaagcctggagtagccccaaattcttttgctgtattaatacctacataaatattcaaatatgcaaataaagcactagaaatcattgctaatactgttacgccaagattccaggacatcggcaatactttagcagttaacaagtttctcagaattcccgcaacaccggaaattagtccggcacctacaaatgcaggtattaatggtacaaaaattgccgaaatatgttgaagagctgaccgccaccaggtcttttttaaagaagctttgtgagctgcatgcacttcagctgctttcttttcaacttcacttttattagattgatatgaatttgtttcaggaaaagtttctccttcctttacgccagcctcattattcattatcgtggcaaccttagtattaacgcctggtcctaaaacaatttccagtgtatcagcttcaactactcctaatacaccatttatctttttcaatttctccatatttactttagacatatctctgattttaattctgagtcttgtcatacaatggatcaatgattcaacattatttataccaccaatttcttggtagatttcatcgcttagaatttgatacttatcctttgacatgatgaatctccttatataaatgtaaaaatgtttcatttaaatatgtaaaaatttatcacagtaattaatgtaatcgctttctacatctaaaatattagatcctattagtatttatgtcaataatttatccttaataaaccaaatatatttaatctatagttttatgtaaaaataaaatattgttacatttattaaaaatgcttatttactaatcttaaagatattacccttcaagattactcctacttgctaactaaacgtaaggggcttataatacctaccattgtaatgtttaaatctacaaggagaggtgaattcatgggtccttttttcttattcgtttatttaattttgggtgggaccttaggaggtttgctatcaaccattgctagcatggcttcgctagcaacttacccaatacttttatcagttggaattccgcccgtatatgccaatacaaccaatgatgctgctttaatttggactggagttggttcaactgcatcatccctgaaagaattaaaaggacattggaaagaagtaattttctattcaatctttacaattgttggatcagctttaggatgtatgcttttaatacaatttcccgggaaaatattcgaaaaaattgttccgttttgtatcgctttttctggtctaatgattttattcagtggtgaaattcatctggaaaaagatggtaataaccgccttcttcagattatatctttactttgcttagtgattactggtatctatgcaggatatttcggagcagcaagtggcgttttaatgctcgttatcttgaacgccattagtgatgatgattttttgacagttaatgctatgaaaaatataattggggctctttcaaacttagttgccctaatcatctatatgtttactgcaaaaatttattgggattccgccattccattggctattggtgccttaattgggagttatttcggtcctcgaatcatgcggcacatttccgttaaagttattcgcttaggaattgccgttttagctcttattcaagcagcttactttgcttatactgcatataggtaaaacatttgtaatacgtaaaaagctctacctgcgtaaaggtagagctttttcagttacttttaaataattttctttcatttcagtttatatcatcgcaagcggcattttttcagtcggctgcggaaagtcattatcaattaattttatttcatcgggagtcaatttaatatccttagcagcaatattttctttcatgtgtttaacattgcctgcttttggaatagataaaatattaccctttctcaaagtccaagcaagcatcacttgatgcggcgttacatggtgagcgcgagcaacaatcttaagattattagtaattctgattgaatcacccttacctgaattaaatggagaatatccaataaagccaacgccgtgcttttcttgccaaggtaagacggcgtactctacccctcgctcagagagattatatagatcttcattagcaaagcagtcttttccgccaggaacgctaaataattcttctaaatcagccacatcaaaatttgacacaccccaatgacgaattagtccttctttttgtaattctttaagtccacgaaccgtttcagataaacgcttgtctccgcgccagtggagtaaatataaatctaaataatcagttcctagtctttttaaacttttttctaagctttgccgctctaattctggagaagcatgatatggataaaatttcgaaattaaaaagattttactccggtcatatcctctaattgcctcgccaattagcttttcactttttccttcaccatacatttccgcagtatcgattactttaattccatgatccaaaccatagcgaagggcagcaagttcatcttttttctttgaagcgtcttcgccgattccccaagttcccatacctaaacctgatagattactttcctgaaaactcttctccatctcttctcacctcacctaaattttaccgcagaaaaaaataaaattaaaaatgttagcggtttaatttgactagaccaattttatattttataatggactagaccaatgaatgaggaggtatatattatgaaaatcatcgtaactaaagataatattgaaggcggcactaaggcatttgaaattattaaaaagggaatggaagatggcgataaagttttaggtttagctactggctcttctccaattccactatatgacgatatgtgcgacagcgacttagacttctctgatatgactagtattaacttagatgaatactatggcttaaatccagataatgatcaaagttatcattacttcatgcaaaagcacttatttgataagaagccatttaagcattcttatattccaaacggaatggcaaaggatattgatgaagaagttgatcgttataacgacattattgctgctaatcctattgatatccaaatcctaggtatcggtagaaacggccatatcgcttttaacgaaccaggtactccatttggcagtttaactcataaagttcaattaactgagagcaccattaaggccaattcacgtttctttgataacgaagatgaagttcctcgtcaagccatttgtatgggaattaaatccattatgcaaagtaaaaagattgttttacttgcatttggcgaatcaaaacaagatgcagttaaagccttagttgaaggccctgttactgaagaggtaccagcatctatcttacaagatcacccagatgtaacagttatttgtgatgaagttgctgccgcaaaacttgatccaaaatatagaaattaatcctcattaatcagaccgtttacttgaacgaattaatctttttagattagttcgttttttatttggtagaattcttttacctttaatctacattttttcagatctactcttgactttttcacttaactcttttttcaaaaatagcttgcctacctaccagatattgaattacactattaaagcaaactatatattgtagaaagaacgtgatgacagttattgtattgagcgggcccattggagccggaaaatccagtttaaccagtcttcttgccgaacatttaggcactcaagccttttatgagggtgtagataacaatccaattttgccactttattataaagatatggctcactatacttttcttttaaacacttatcttttaaaccatcgtttggctcaaattaaccaagctattcgcgatcataacagcgtgtctgatcgttccatttatgaagatgccctatttttcaaaatgaatgttgatagtggtattgctgatcctacagaattcaagatttatgatagtttacttgagaatatgatggagcaagcacctggtaatccaagtaagaaaccagatcttttaatttacattcatgtttctcttgatactatgcttcaccgaattcaaaaacgtggtcgtaagtttgaacaattatcaaccgatccaagtttaaaagattactatgctcgccttttatcatattacgagccttggtacgaaaagtataatgcatcccctaagatgatgattgatggtgataaatacgactttgttgccaatgaagacgcaagaaggaaagttattaacgcaattgatcaaaaacttattgatatagggaatttaaactagttaacgaatagaaggaacgtgatgacagttattgtattaagcgggcccattggagccggaaaatccagtctaacaggtatcttatctaaatatttgggtactaatcccttttatgaaagtgtagatgacaatcctgttttgccattattctatgaaaaccctaaaaagtatgcctttttactgcaagtttatttcttaaatactcgttttcggagtattaagtcagccttaactgatgataataatgtacttgaccgttctatctacgaagatgctcttttcttccaaatgaatgcagatattgggcgtgctactccagaagaagtcgatacttactatgagctcttgcacaatatgatgagtgaactagatcggatgcctaagaagaatcctgatctcctggttcatatcgatgtctcatatgatacaatgctcaagagaattcaaaaacgtggtcgtaactatgaacaattgagttatgatccgactctagaagattactacaagcgtctacttcgttattacaaaccttggtatgagaagtatgactattcaccaaaaatgactattgatggtgataaacttgatttcatggcaagtgaagaagatcgtcaagaagtcctaaatcaaattgtggctaagctcaaagaaatgggtaaatttgaagacgactggaaacctaatttagttaaataaagcaaaactgcggtccaatatggatcgcagtttttattttttaatcctaacaatcaatgtcttgatgcaccacttacagcatcagctgcttcacctgttaactgattttccttagtaacaggatatggtttcatcacacttctgctcgttgaagaaatgccccagtcagcactgtaattaatatgatcaatcttagcatgtttaatatcttcaattgtcttacagccggttaattgcatatcaatcaataattccttatttaattgctcaataactgattgaacaccttgtgcaccaccaagtgctaagccatataagaatgggcggccaataccgactaagtctgcacctaatgctaatgctttaaagacatgagagccgcgacgaacgccgccatcaagaataattggaacacgatgatttgagcttcttactgccttagcaatttcaggtaaaacatcaatcgtcgcaggagcgccatctacttcacgtccgccatgattagaaactacgatcccatctgctccagccccaatagcaagcatagcatcttcagcacattcaactcctttaacaattacaggaacatcagcaatttcctttattttacgaatatcatctggtccaatattttgagccgatgaagcatacatttgtgcaacgctttgtccttcaccctttccaccgttccattcattaaagaaagccaacggtaccggataagtaaagttagttcgtaagttagcttcacgatagccactaactaaagcatctactgttaggaaaaatcccgtaaaacctgctttaactgattcttcaattaccatcttattaaagtcccagtttttgcttaaatatagttgcataaatctaggagaatcccctactgcactttgtacttcttgtacactcttatttgcataggtactcatcgcaaataaggccccagcagcttttgcaccttttgcagtatcaatttctgcttcagcgtttgcaataccgtggcatgcaattggacaaatcataaccggggtctttaacttcatccctaaaaactcagtattaagttcagggttttgcattccagtcaaagctcgaggaactatttgaaaatgattaaatgcttgagtgttatttcgccaagtccattcattttcagcaccactagctacatagtaataagcagcttctggcatcacatattttgcctcattttccagttcatctaagttaaccatatgtaacttttcttctcttgtactttgtggaaagcccttatagtaagttgtcatcgtacattcctccaaattttataacgcatgtttctttacactttaattttaagactatttttttaaatgagtaactaatagcccttacgaaataattcactatctcttataagatttactttcagaaagtttttacaacctttcatcgctaaaattcgcgtttacatttatttatgggaatgctacactataaaagttgcttatttaaagcttaaaaacgaacattatgtctggaggacaaaatgaattttataaaaaactactttcatttagaaaagttaggaactaatgttagaactgaatttattgctgggttaactacttttattagtatgtcatacattcttttcgttaaccctagcgttcttggcgctagcggaatgaataccggcgctgtctttaccgctactgctttagcagctgctcttggtacagcaatcatgggaattgttgccaactacccgatcggtgaagcacctgccttaggtattaacgcattctttgcttacacagtatgtattggcatgaaagtatcctgggaaactgctttagctagtgtttttgttgcatcaattatctttattttaattaccttatttaagctaagagaaaagattattgattcaattccttcagacttaaaatttgccatttcttctggtattggtttatttatcgcctttcttggattacaaaacggtggcttaatcgttgctaataaatcaactttagttggtttaggatcacttcataatccactcgtttggattaccatttttggtttaattgttacagtaatcttgatgatcttaggtgttccaggtgctatttttattggaatgattgccgcatcaatctttggaatttgtaccggtcaaattgccgttcctcataagtttatctccttagcaccaagcttagctccaacttttggccaagcaatcttccacgttaaagatattaactctttgcagatgtgggttgttgttttaactttcttacttgttacattctttgatactgccggtactttaatcggtcttgctcaacaagctggctttatgaaaaataataaaatgccacgtgtcggtaaagcattagctgctgactcaactgctatgatgtttggttcaatcttcggtacttcaccagttggtgcctttgttgaatcaagtgctggcattgctgttggtggtcgttctggtttaactgctgtctttgtagccattttcttcttgatttcaatgatttttagtccactacttggtgtctttactacacaagtaactgctcctgcgttaattatcgtcggagttttaatggcacaaaataccgcacatattcactggaacaagttagaaattgccgtacctgcatttttaatcttacttggtatgcctcttacttactcaatttccgacggtttggcattaggaatgattacttacccaatttgtatggtttctgcaaagcgtggtaaagaagttagcccaatgatgtgggtactgtttgtagtatttatcatcttcttatgggtattgaattttaaatagattgaaactcaagagaaaagctcgtgctgatgcacgggattttttggttaatcaaaaatttttctgtcaattttaaatattgttttactctctactgatttccaaacaataagattttttaccgcattttggacaagtcaattttctaaacttaggcgtatgcggggctaaattaaatgccaaaaatgatggaataaatacatctccgcaattaggacaaacatattcaacatggtcatagtaatatcgcgacaatcccaatgccatcataaaaataataactactagtgcaagaacttcaattacaaagctagttatctggtttagatgatataaataaaatgctatgccgatccctaatatttcaattattgacaaaagccctccaaaaactaacatcttatctcttaaagctgaaagtctattttcttttctcataatatctgtaatgccagagtgattggttaatacagcacgcgacaactttattttttgcaaatgttttatttgtgcttgtttcttacttatctcctcaattttccgctgattctcctggtattgttctttaagcaataactccactgactgattcccatgctcatcttgaatgagcatttttatctgcttcaatgaaaatcccaattcttttagaaaaagaattaattcaagttgtcttatctgatctttttcataaaaacgatagccattttcttcagtataagctggcctcactagatctttttcctcataaaaccttaaagtccgtgtactcacttgtaatttctttgctgcttctccgatggtatatctctctgacattactttcacctcccagctttaagatatcaattgacgtaaggttaaagtcaacttctaaattataaaatattctatttccttggaaatattgttcggcttttaaaccaattttcttatttttgtacctattattttatatttttttgatttaatcgaataattatagtttttattcttgaaatagttaatattttagatataattttatttgaagattcgcttttaaatgattaaatacataaattaatcatttaaaattatattttcctttaaaatccgaacattaccattcttggagggctacatgaattcaattggtaaatttttccatttaaatgaaaaccacacttcatttaaaactgagtttttagctggattaactacttttgtaagtatgtcttatattctttttgttaacccagctgttttaggagcaagtggcatgaacaagggagcactatttaccgctactgccttatctgccgctttcacttgtattgtaatgggagtaattgccaattatcctattgcctctgcaccaactttaggactgaatgcattctttacttatacagtctgcttagggatgcatgtaaaatggcagactgctttagctgccgttttcgttgcttcaattcttttcattttactaactgtatttaaagtacgtgaaatgattattgacgccattcctagtgatatcaaatatgctatttctgctggtattggtttatttattgccttcattggtcttcaaggtggtaaattaattagtaaaagtgattcaactttagttactgttggttccttaaataatccacttgtttggattacaatctttggtttagtagtaacgattttcttaatgattgccaaggttcctggtgcgatctttattggaatgattgttgcggcaatttttggtattataattggtcaaattccaatgccaaaagcatttatttcaggagttccaagcctttcaccaatttttggacaagctgtatttcatattagtgatatcaatacagttcaaatgtggattgtcgtctttacatttttactagtcactttctttgatactactggtactttaatcggtcttgttcaacaagctggccttatgaaagataacaaaatgccacgtgctggtgaagctttagccgctgactcatccggtatgttagtaggatctgttcttggtacttccccagttggtgcctttgttgaatcaagtgctggtattgcagtcggtggtagaactggtttaaccgctgtttgggttggtattttcttcttaatttctactatcttcaatccaatcttgagcgtcttcactactcaagtaactgctcctgctttgataattgttggagtattaatggctgaaaacttggcgcacgttcactggactgatcttgaaatcgcaattccatgtttcttaattgctcttggtatgccacttacctattccatttcagatggccttggctggggactaatcatttacccagtatctatgctagctgctaagagatttaaagaaatcacgccaatgatgtggatcctgttctttatttttgttatttacttcgttgttctgaatgttaaatagtatcgattagcttatatatattaaaacaagtagcttttaaggctatttgtttttttgatttcaaattggcatcttttgctaatcaattgacatcttatgctgtttgaacttatggcctttatttcctaagaaattctttctctaatttgcctatctccaaaatatctgctagaatacttaacaatcaagttatctatatatcgtcgaaataaggtcgacagtatctaccctgagccataaattcaggactataggtatcagacgtcataaattgctttaaaggacatcttttacccgtggctcttgggtaaactgtgtccttttttcatttttattttatgttggagaaatgatgcaatttttagacaaaatctttcatttagaggatgctcatactaatgtcaaacgtgaattaattgcagccttaaccacgtttgtttcattgtcatacatcctttttgttaaccctaatattttaagtgcagctggtattaataaaggagctgcctttaccgttactgctattgctaccgcaattggttgtttcttgatgggatttattgcgaattatcctattgccttagcaccaacacttggtagtgcagcctttttctcatataacgttgttatcggaatgcatatcaattggcaaactgccctagctagtgtgttagtagcttcaattttattcattttgattaccgttttaaagcttcgtgaaaaagttgttgatgcaattcctcaagatttaaaatatgcaatttctgctggtattggtttgttcattgcctttattggattgcaaaatggtaaattgattgtcgacaataaatcatctcttgtcggtcttggttcatttaacaatccagccgtttggatcacattatttggtttaatcttaactgtcatcttaatggcagctaaagtaccaggctcaattttcatcggaatgattgtaactgctattttcggaatgattattggtcaaattccaatgccacatggtattgtttcaggtgctccaagtattgctccaacctttggtcaagcagtttttcatttaaaagatatcaatacaccacaactatttatggttgttttaacattcttacttgttacattctttgatactgctggtaccttaattggtatgacacaacaagctggaatggttgataaaaacggtaaaattccacgaattgggaaagctttcttgtcagactcactagctatggttgaagggtctgtgttaggtaccgctccacttggtacctctgttgaatcaagtgccggtatcgcaatgggtggtagaactggtttaactgctattttcgttggtattctattcttaatctcaatgatcttcagtccacttttagcagtaatcccaaccactgtaacggctcctgctttaatcatagtcggagttctgatggcaggtaatcttaaatacatccattgggataactttgaaattgcctttccatctttcctagtagtagttggtatgccgttaacttactccatctctgatggtttagccttaggaatgatcgcttatccaattaccatgattgcttctaagcgctataaagaagtatctccaatgatgtacattttatttgtaatctttgttatcttcttcttaattactaatatgggctaattaataatcttttttcaagctagtaacgctatctcttaagatgcaagcattactagcttgtttttttgactcaattttcattaaattaaactgcgaggtgaaacaaaatggactttaacgaacaaataaaacgccttcgaaaagaaaataacttaactcaggaagagatggccaagaaactaaatgtaactagacagacaatttctaactgggaaaataatcgtaaccttccagattttgaaataattattttgattgcagaaacatttggtgtttcccttgatgaattaattttaggagataaaaagatgaataaaattgagcaaactttgatcaacgacggcaaaagaacacgtgcagcaaaatttaatatggtcactactatcatcgggagtgcattcattattttaggaattattttcttcttaatcagcggtgcctctgtttcttatattgatagtaatggttttttacacgaaaacttcttcttaattctattaggctatctttcattatttgtagggatagtgatcattattgcccggataataaattcgattcgtcttgcaattaaagaaagaaaaaacaattaaacttaaattttacgcgagtaatatgcgataattaggataaaaataacaatggagaattatttttatggcagtcaaacctattattcatgatgaactttctttaaaatttaagtctctaccagcaactaaacaagatttaggagcagccactgatttaaaggacactttactgtctaataaggatagagcagctggcctcgccgcaaatatgattggtgttcaaaaacgaattattgctttatttgttggaccactcccaattgtgatgcttaacccaattattgtggcccaagatgataaatatttagcttatgagggctgtctttctttaactggagaacgtccaaccgaaagatacaagaccatcacagttaaatatcaaaatgagaatttagaaactcggcaacaaagtttctctgattttactgctgaggtaattcaacatgaagttgatcattgtaatggaattttgatttaattaaaaatttttacgtataatatttttcccaaaaaaggtagagtactcgacttaaaaatcgaatactctaccttttttattttagaattgtcgattcgttgaaccacgttcaattttaattctaactatcaagtggattaaattatacagcaaggttaatgctaataaaattatccaaaaagcaataaatgcataaataattagtaaaatagctgggaaaatacctaaaaaagttgctactaaactatcagctaacttcagcttcttattaagaattccctctctaactaattgatatgacttaaatcctaaatagcctgaacctgtgattccagctagccttaacaagagatcaatatttataaaggcacaaattatgctaaaccctatataaaaactaccaattacaactataatatttcgatctatttttgtaattgcatggtcttcttctaatttttgttctatgtcaataaggcaataaatgattgcacatactgccactagtcgatatacccagcttacattttttaaggctaaaaatatcactacaatactcagaatgattcctattacgccgataatatgattcaactttctatttttaataattaagtctgggcgcatctactcaatcctttcttttttctatagttctcggttagttccgtcatgttcaaccttaattctgacaattaggtgaatcagattataggctaaagcaaaaatcaaaagaaatagccaaagaatgtctttaggagtaagtaatataagcacgattgcacttccgagtccaagacaaattgcgactatactctccccaaatttcagttttttattcttcaaatctttacgaaataccgcgttcgtcttaaagcctaaatatcctgcacttataatgccaaaagctagtaataaataatctaaattaatgaaagcaaaaacaatactagtcagctcataaactattccaaggataataaaaataatcttctgcgtcctattaattgccttactgtcttcaagcatctgttctacatcaatccagtagtagagaataactgctacgacaatgaaagtaagtagccaaccaatatttttcaatgtaaagaaaaccatcatcaaagcaatcaataagctgataatgccaaaatacttatcttgcttacgtcttttagctagttcaatccatcttttatcgtccatctactcaccttcttaaattatttgtctagattttactatgaaatgagtattttaacaataatttaattatatttttattaagcaagctaatctttattgttgacaagtgtaaactaaaagttatatgattacatttgtaaacgaaaggaatatataaatgaatgaaaagaatttatcttcaatttcagacagtgaatgggaagtaatgcgcattgtctggacattaggtgaaacaaatacaaaacaaattttaaacgagcttcaagctaaaaaagattggacagattctactatcaaaactttaattagacgtctcgttcaaaaaggctggttaaatgctaagcaagatggacgccggtatatctacacagctacggttaatcaaaccgaaatgatgtacaacgaagctaagaccttactaaatagaatgtgtgatatgcacaagggagaagtaattttgaaacttctagaagactcccccgtttctaaaggtgatttaatgaagatgaaaaaagagatcagtcaaaaagaaaaaacggcacttgaaatggttccctgcaattgcttaaaaacagggtctactatttgttaggaggaaacaagaatgaacgtaagtcagatcattgccttaatcgtcggggtaattttaatcggttttattatttggtggttctttggcaaacataaagaagctgccggtacgagcacaattgttaatgatgaacaaactgcaacaattgttgtaaatggtggctattcaccttcaacagtaattcttaaaaaaggtgtgcctgctcaagttaactttgacatgcgcgactcaacagcatgtttatcccatgttgttttcgaacaattaggagttaatgaggacttaaccaaacaaaaaattactactgtcaatattccgacagataaggccggaacctataactttgcttgcggaatggatatgttccacggaaaagttatcgttaaataaagaaaggatctattaaaatgagtattttttcaaaaaatcaaaccaaaaaagttgttgtcaatgcagaaaatcatggctataaaccagataccattacttttaagcaaggtaaacctgcccaattaaaatttattccatctgacaatatgggctgtatgaacgaagtagtttttaaagacttgaatatagatgacaaacttgatggtaaaaaagaagttattgtcaatatccctacagacaagcctgctacttataattggagttgcggaatggacatgtttcatgggaaggttgttgttaaataatgaagttatcaaacattaaaagattttggatatcttttatcctctctatcccaatgcttattcaaatgtttgcaatgccatttcattggatgatgccaggatataattggattgctcttatcacaaccacaatcattatggcaatctctgcacttccttactggaaaagtgctattgccgctttcaaaaagcatagtgctaatatgaataccttagtggctactggtacagctgttgcgtatttctacagtatctttgccatgatcactaatcgtccagtttactttgaaagtgccgcatttgttactgtattcgtcttattaggcgacgctatggaagaaaagatgcatgataacgcatctaatgccttaggtaaattaatgggtttacaagcaaaagatgcggaagttcaaagagatggtaaatttgtaaaaattccacttgatcaagttcaagttggcgacattattcgcgttaagccaggtgaaaaaattccagttgatggtgagattctagaaggtgttactacactggatgaatcaatggttaccggtgaaagtatgccggtagttaaaaaagttggtgacaccgttgtaggttcaactattaatagtaacggtacaatcactttcaaggctactaaagttggttctgacaccatgcttgctcaaattgttgatttagttaaaaaagctcaaactagtcatgctccaattcaaaacttaacggataaaatttctaatatttttgtccctgctgttatgattattgccattttaacttttatcatttggtactcattccttggagcaaccgctgttgaagcaatgctttttgcagttagtgtgatcgttattgcctgcccatgtgctttaggacttgctactccaaccgctttaatggttggtactgctcgtagcgctaaaatgggagttttgatcaagaacggtgaagttcttcaagaagttagtgacttaaatactgttgtctttgataaaacaggtactatcactgttggtaaacctgaagttactgatattgtcggtgacaaaaaacaagttttaagaattgctgcaagtcttgaagagtcgtctgaacacccgcttgctatagcgatagttaaaaaagcagattctgaaaaattacaaatcgaaaaagttagcgactttgaagcaattgaaggtaaaggcgttaaagctaattaccatgatcaaacagcttttgttggaagcaatcgattactagccgacgtcaacatttcccaggaaatgaaccagcaagctacaaaattacaagaagaagctaaaacagttgtttatgtcggcttaaatggtgaaattattggcttaattgctattcaagatattcctaaatcaagctctaaagaagctatcagtgaacttaagaaacgtggattaaagacagtaatgcttaccggtgataatgaaaaagttgctcaagccattgctaatgaagttggcattgaccaagttattgccggcgttttaccaaatgaaaaagctgaacatattcaagagcttcaacaaaatggcgataaggtagcctttgttggggatggtatcaatgatgctcctgctctttcaacagctgatgtaggaattgctatgggatctggtacagatattgctattgactcgggtggtatcgtcttagttcaaaatgatttaagaggtgttgttcgcgctcttgatatttcaaagaagacctttaatcgtattaaattaaacctcttctgggctcttatctacaatacaattggtatcccaattgcagctggcttattcgttggtttaggttttacgctaagtcctgaactagccggtttagctatggcattttcatctgtttcagttgttggtagttcactacttttgaacaaaacaaaaatcgctggaactaattaatgtaatttatttttatagtgataactagtttttctcaagtaaaaaatcagttctatcttaacgatatgagctgattttttattttcttaatttttgctccaatttgttattcatctcattttttgcaacccttttcattttatgagtggttttatttaaagtttggatacccttctcctataatgaagctggtagtcaaaatcaatggatgttaaaaaggagaataatatgttgtcaaaaaacaattttaaagaacgtctccgcaaaatggaggatagacaagatagattttcaattcgaaaattttctataggagcagtctctgtgttaattggctcatttattttttgtgtccaatccacacaagttgctcatgcggatactttggctgaaaaagatagcactgtagtatctactaaagacagttcaaaagtagtcgccagaggtaatagtggcacttctaatccgtcttcaaataatcagttacactctgctaatcagaccatcgatactaatacagctaaattggagcataaagctacaactggtgaactcaaaccagttagctctaatacaatctcagctgttaagcaacccactacagacatagagagtagctcaaaaaatcaaactctattaacaaaaaacaatgctataaaccaatcccaatctaatactcaagaaatctctaataatcaaggaaatagggcttccacgataaataatactagtgttaatgatcaggcaaataccaaaaaaactgatactcttaacacagatacaactattagtgacgcacctaattatcctgatacccatggtgtagtgcctacaacccaatacatatttgaccaatttactttaactaacggacaattgactaataatgcttatacacctttaaatatgcttattactcttactaccgatagaaataatcctggaaataaactaaattattacatcactaataataattattcagaagtatatgctaacgatgcaattaatgtagaccaatacgtaaactatactggagtcggtccatatccatcttcaaatttagtaatctataatttcggcccaaatggtattagcgttaatgaaaataataataatttcggcttagcatttacatttggttatggtaagtatgattctataattaactcaagtgatcctaatccattttcatcctcaaatgtttcaaatgcctggggagacacgacaccaaccaatgttacccaaactatcacttacgttgatgctcaaactggacaacctatgccaaatacgccaaccattgagtcaaatggattaacaggacaaatatatcaagttgatcctgcagccgaaaaaattataaaaggctattacttagttaataaagaaagagatcacggtgttatttctcaatataaaaatggtggaacttacactaatgaatgggtttctcaaagtggacaactaataaaagaagtatggcatcaaataaattctaatggtgttatgcaagttgatgtttatatcaataatgtacaaaaatatgatccaaataatttaaagggtattgtctacccttccacaatgtctaaagatggccctacacaattaaatatcgacaatggatcctatgtctttcctaatccatatgtagaacaaacaagtaatattgaacttaaatatgatccattaggtcatataattcctgtaacacctgatggtaatccaattccaaacgcacctactccgcaatatactaatagtcctactaatcctagtgcagtagagccaaatgaaccggttccaaatatcccaggatatacgccgaaagtttcaacagtaacaccaactgatcctggtacagatacaaaagtaatctatgttccaatcgaacaaggttcaataactgttaccgttcatgatgtaacagacaatgtaaacttacctcaatatggtaagagcagtggtgagcaagatgtaggtactagattcacttatgataagaatactgtaattacagatcttgaaaacaaaggttataaagttcttaatccagatgtagtaattccaaccactattagtaaaggtgctcaaaatattgttattaatgttgaacatgagcttgttcctgtaacaccagaaaatccaggaactccaggccaacctattaatcctaataatccagacggtccaaagtggccagacggaactgctaagaataatttagaagcaaccggtactcaaacaattcattatgaaggtgctggcaataagacaccagctgataatattcaacatttcactttcactaagagcgctacagttgataaggtaactggcaaagttgttagtgaaactggttggaatgtttctagtcatacatttggtaacgttgatacaccagtagtggcaggctatcatgcagataagtctgttgctggtggggctacaattactcctgatgacttgaataagacaattgtggtaacttatgcaccaaatggtcatgtaattcctgttggccctaatggtcaaccaattcctgatgctccacagcctcagttcccaaccaaccctgataacccaacaggaacaacaccaagtgaagttccagtagtaccaggatatcaccctgaaaatggtaaacccggtgatcctgtagatcctgttccaggtaagcctggtgaagatgttcctgtgaaatatgttccagatactccaacacctgaaacttataatggttctcaaaccattaagtttgttgatggaaatggaactgaacttcacactcccgatacccagaccgcaactaacctaactggtgagcacacatttggtaagatcaacactccagttattaagggctacactactactgaaactaccgctggtggagctactgtaactaagaacaaccctaacgctgtaattactgttacctacactccaaatggtcatatcattcctgttgggcctgatggtaagccaattcctgatgcaccacagccacaattcccaaccaatcctgataaccctagtgaaactactcctgggcaagttcctgatgttcctggttaccaccctgaaagcggaaagcctggcgaacctgtaaaccctgttccgggtaaacctggtgagaatgttcctgtgaaatatgttccagacactccagcccctgaaacttacactggttctcaaaccattaagttcgttgacggaaatggaactgaacttcatactcctgatacccagagcgcaactaacttaactggcgaccacacatttggcaagatcaatactcctgttattaagggctacactactactgaaaccactgccggtggagcaacagtaacgaagaacaaccctaacgccacaattactgttacctacactccaaatggtcatatcattccagtaggcccagatggtaagccaattcctgatgctccacagccacaattcccaaccaatcctgataaccctagtgaaactacccctgggcaagttcctgatgttcctggttaccaccctgaatctggtaaacctggcgaacctgtagatcctgttccgggtaaacctggtgagaatgttcctgtgaaatatgttccagacactccaactcctgaaacttacactggttctcaaaccattaagtttgttgatggaaatggaactgaacttcatactcctgatacccagaccgcaactaacttaactggtgaccacacatttggtaagatcaacactcctgttattaagggctacactacaactgaaacaacagctggtggcgctactgtaactaagaacaaccctaacgctgtaattactgttacctacactccaaatggtcatatcattccagtaggcccagatggtaagccaatccctgatgctccacaaccacagttccctactaatcctgataatccaagtgaaactactccgggtcaagttcctgacgttccaggctatcacccagaatctggtaagcctggtgaaccagtaaatcctgttccgggcaaaccaggtgagaacgttcctgtgaagtatgttccagatactccaactcctgaaacttacactggttctcaaaccattaagttcgttgatggaactactggcaaagagattgaaagtcctaatgttcaaaaagctactaacctaactggtgagcacacatttggcaagatcaatactccagttattaagggctacactactacagaaactaccgccggtggagcaacagtaacgaaggaaaatcctaacgctgtaattactgtaacctacacaccaaatggccacattatccctgtcggtcctgatggtaagccaattcctgatgcaccacagccacaattcccaactaaccctgataaccctagtgaaactacccctgggcaagttcctgatgttcctggttatcacccagaatctggtaagcccggtgaaccggtagatcctgttccgggtaaacctggtgagaatgttcctgtgaaatatgttccagacactccagctcctgaaacttacactggttctcaaaccattaagttcgttgatggaaatggaactgaacttcatactcctgatacccagaccgcaactaacttaactggcgaccacacatttggcaagatcaatactcctgttattaagggctacactactactgaaaccactgccggtggagcaacagtaacgaaggacaaccctaacgccacaattactgttacctacactccaaatggtcatatcattccagtaggcccagatggtaagccaattcctgatgctccacagccacaattcccaactaaccctgataaccctagtgaaactactccgggtcaagtcccagatgttccaggttatcacccagaatctggtaagcctggtgaaccggtaaattctgttcctggcaaacctggcgaagacattcctgttaagtatgttcctgataccccagaaacctacactggtagtcaaactattaaatttgttgacggtaagactgggaaggagattgaatctccaaatgttcaaactgctactaacttaactggtagccacacatttggtaagatcaacactccagtaatcaagggctacactactacgcaaattactgctggtggtgctacagtaactagagataatccaaatgctgttgttactgtaacttatattccaaatggtcacatcatccctgttggaccaaacagcaagcctattcctagtgctgatcaacctcaattccctactaacccagagaaccctacagaaactactcctggtcaactccctgtagttcctggttatcatcctgaagtaggtaagccgggggaaaatgtaaatcctgtcccaggcaaacctggcgaagacgttcctgttaagtacgttcctgacactccagtcaaaccaagcacaccatttacacctactactcctgaaacacctagaaataatccaactcgtccttcagaaactccaattgcaaataacgttgaaagtaacaagaagaaggaagagcttccacaaactggaagaaaagaaaaccaagctcaactaatcggattagcagtagctggtattagcttcttacttggattaatcggtgatcggaagaagaaagaatagcttaactttaagcgaataaaaaatgcgctaagattaaatatcttaacgcatttttctttgctcatagaaaatggattttaattaaaaacatattccttaaataactactttttattctttattctcagtactgttcctaaactagcaaataaggcagttattcctgtaactagtaatccaaagaatgtttctctttctccagtcttaggtaattctttattattgctactcttagtacttcgagttgaactatttgtagtattttgagctttattgctatttttatgagttggcaccttattatcagcattcttctttgaagattcttgagcacttcttgcaacttgatgctttttccctactaatgtgctgctctctttatcagatacagattcagcatcttgtttcttttcttctggttctttcacttcatctttagacgttgatgcagaatgagattcagattttttagcttcttcttgttcattcttagataattctgcctgatgttctacttgtgatagagcatctgcaggtgtttgccccttcttctctactgaagttccagttcctttatcagatacagagtgagcatcttgtttcttttcttctggttctttcacttcatctttagacgttgatacagaactagattcagattttttagcttcttcttgttcagtctgcttcttctcaggagttacaactggttgttcaaccttaggcaattccacttgatgttctacctgtgttaaaacacctgtagcagtttcaagtactttttctgctttttctaagctgcttgcagatgcatttttatcatttaaaacatcccggacaccattcaatatttctttgaatttatcttgcgattctggcgtatatccgtctaagtttacattggcattcttattaacctcttgttctaatgcctctctagctttatcaacttcttgagtatcagattcagcaggcttattttcttctttcttaactaagcctttttctgcttcaacaagactatcttttgctttattaacctcgtctgcttgtgcatcttttgaatcgagtactccttctgaaatcttttcagcattatccttcactttagcagaatcatcagtatactgagatttatcttcatctttatgcttattaagttcttctcttaattgttctttagctgtttcaacatctttatttgattctgttttttcaactaaatctttctcagcttgagataaactatcaagtgcttcttgaacttgagctttattagcatctttattagtcaaaacctgatttactttcttcagtgcattactcaagttttctgcactctcagaagtatacttcgtggtatccaaatgactaagtttgtctgccttttcttttaaagcattctttgcagcaaggacttcctcggtatctttattttcctttggtgtatcttcttgctgagttgttttttctggagatacttgcttttccttaagagatttcgttgcattaacgatagaatctatcgcatcttgaacatcagttgaatttgcatctttattagctaaaactactttagcttcatcaagagctttagttactttttctactgaatcatcagtatatttatccttatcgaatttttcaccagccttaactgtctcttccaatttttctttaagtgcgtttacttgtgagtctttatcttctactttgtctttatctttattttgatctacaggcttttcaaccaaattcttaattgcttcttctagttgttcgcttgcctgcttcaattcttggagagtagcattcttatctttcaacgctttacttgcttcttggcgagcttgagctaattttttagctgattcatgtgtgtacttacctgtatttcctaaagcacgtgcttgatcaagcttctttcttaaatcttttcttgcttgtgcaacgcttttatctacagtactctcttcttttccaatagttttgacatcatactcaactacttcggattcattaccgtatttatctacagtcttaaatagaagcttgccattatttttgacagttacaccatcttctggaagaacattgtatttatttccattatcagtactgtataaaacgttgccatctttagcctttccagttacagttactgattttttatctgacgctgttgtagcagtaatttgcggtgaggccaatttctgagctttcttatagtacacaactaaagtttggacttcactgcggttatcattgttgtcgactactacaacattaaaagtatttttgccttctttaagtttaacagaatggctaaagctcttcttcagattcttattaccgttgtaatcaacatcatcccaatttgcatcaacattattatcatttatgagcaaactataatatggataatcatcactaattgtaccttgaagcttaaattcttctttatttgtataaacaggtacataacctgattgatccttctcttggttaagggttaattctggattatttgaatctacgtagaatgttaagcgttcttgaacagtatcattaacagtagtatcaccaattaaaactgggaaaactttagctccatgcttaccaagatcaagtactagtttaaatgttccatctgctttaactttaactgtatgatcaccaattctaacagtagtagttgggcgatttacttttccagttaaagttaacttaccagtcttaggatcgtagttttcggtctcggtattaacgctagttgttccaaacttaattccattatcaaaggtaacatcctttgcggaaacaacagtcttaccacgatcacttgacttaacaatttgcttaacagatgaactattcccatctttgtcagtaagaacaatattcattgtattttcgccgtagcttactggaactttaactttaaaggtgtgttccttagttggtttagcactataagtcttacctgcaacttttacagcaactttatcagtatcatcactaacttttcctgatacttctactgtgtcttcagaagtttgacttagtttagcttcttcatttccagtatatgtttcttgatcatctactttaagactttcaagttttggtggaacaagactaacattaatacgtttttgagtaattagtgtttcatgttcttcatcagcatagaatttaacattggtgtcatagtcacttactgataatggcaacttagtaacaaaccgttcactagcttcatcataacttatgttaagatcgtgttcttttccatctttatctgtatatgtaccatatactttctcgggatatgtacctgaaatagtatatgaatcatcagtcatatcataaccatcgcttaccgttgtgatcttttgcggcaagttattatcaataattagtccaaagttaatttcacctggtttatttgatgtccctgaattagtaccagcgttagtagcattatcaaatacagcaatagctaaatcattttttccagccctaagagttttaacttgctcatcgctaagtggaacttcaatcttttgataaccatcactagatgaaccaacaatatcatatgcgacacttctattaagttctccatttacataagtatttgcttgtccatttaatccactgaagttatctttcgcttctgctttaagaacatatgatacttttccagtttgatccttatgtgatcctaatttcaagtttttaacttctggtttcacactatcaactttaactttaatatcataatgttgctgcttcttagtaccatcaaccgtaccagtcacgcgataagtataagttccatctggtactttttcggtcttatttgtttgttgattgaaatatgtaccatcccaagcaggtgcataattaaacttagcatatctttgactacttgctgcccaatatgacttagtaacatgtgccaatgaaactagcgtattaattacttcaccatcttgatttaagatttcagccttaacatcattagcatttctaaacaagaagtattgtggtctcacccacgatacagatgctccatctgctgtagataaagcaattgcatctggatcaactctataatttccatcttcatcttggtttaagccggcataaccaactgctccatttttatttcctgcagtcacaatagttccgaggttattatttcctgggttaaatgctaatccgtttaaaccatcaaaaatagcaggtgcagcccaatcaccaaagaatcccatgtatggaatctttaaatgtgagttatcggacccagtaaatgccataaatccttctacatattgattttctttaaagttatcaggtaatgataagttaatagttacttctttagtagagtttgctggaacaactatcttttcacttggtgtaagtgaagcaccatcaatcttcttttcgaataagacacctgtttttggatcggtttctgaagtatatacatcagaaaacttaccgttctcatttaaaccatattcaatgtctttattggtccgatttgtaaatttaatagtaaattgatgttggcgatcctggaaatctttcaattcaacaccaggataaccattacttccactaacagttgaaggattatgcaaaatagcattaattgcagcctctacattgactaagccggctccctgtctacgaggtgattcaataactgagccatgatcaacgtcaacttcaatattagcagtattcatctgaatattttttattaaagctgcacgttcacttccagacatcttttggtatgtttcataaaacttacctgtcttatcattcatagcttgtacaagtaaagcttgtgatccagcaataaatggtgaagccattgatgtacctgacatattgatataaccattattattttggagagaccaaatatttcctccgggagctgtaatatcaggcttaaatgatagatcagatactggtccataagacgtaaagctagacattaaatcttcttcacgaataacattgtttaatggttgaacttcaacgtttactcgtaataattcatctggatgagcttcaacataagcaacaagcttattaccatcgtcagttgataaaccagctgtaggaaaaccttcattgtataaaactgacgttaatggcgtatttcctccagcattatttacaataataagtcctgcggcgccagctgcttgggcatatttttgtttatcagtgaatgtaatttcacctcgcgaaacaactgcaacttttccttttacatcagctgtatattgactaggagttcccattcctagttttccagatgcatcttttacaatatagaattttttactatcgaaagcatcgtgagatgtatttggagaaagttgcgttacacttggtccaaatatctttttgccatcagcggtagaaacagtcatcccatcggtagtaaccttagtattttcagcagatgcaacagttgtagcacttctactagtaccaggacttccgatagtttccatatcaggattaccataaaagtctttattaactccctcttgattagaggttgaagttccagagtttccggctgaaattacggctgctgttccatgcttaacagctttttctacagccgcgatttctggatcatcctcagtttgttcaccagatacagatcctaatgacatattaaggacgtctgctcccaatttagctgagtcatcaactgctccgattacgcttgttgaatcggttgtggaggagctatctgaattagaaaaagccttcatcgcaagtaattgtgcttcaggcgcaactccaactactgagcttgctgaattcttcccagtaccattagcagcaacaattcccgcaacgtgcatcccatgttgttcctttggatcatcatccgtaataatatcgttattatctgaataattatgtccaaatggaactttactggtaaagtagcgtccatatccactattttcagtaaatccatcaatatccttagcagtcaatttaaccttagattcatcacttaatcgtaaatctttatggtttggatcaattcccgtatcaataattgaaacaactgttccttcacccttatattgatagtttgaccaaaccgtcgaaacattagccatgttatttgctgaggtatcggctgcaaaatataccttagctaaagtaactgattttacacctttaatctctcttaattttttaatatctccaacttttgcttttgttgcaaaaccattaactacatacccataacttttatcaatggcttgattcgtaattttttgaacttcatccttaattccagattgagcagcaattactttattcgatgcttgctcaatttctgctctacttgctgtttgtgaatcaattgatccattttcagaagctggtagagcctcgagttggacaatcacatctacatagacctcttgctgttcctcgggtgttaatcgttcaaaattaacaccttgagcggcaagttgggcctcaacagcttgtctcgagagagctgtcgtagaatgttctacagctgtcttagattttttaacgctgttagtttggctttctacacttgcctttataatttgttctcctccacctagtatttgaccactagttataagagctgtactgagtaataaccaagtatatttttctcttttctttttcatttaaatcctccttaaagaattgattaactgacccttgtaactaacttataataaaataagaatatatttaatttgatatatttttattttaatattatatccaatttatattaaagttcaatgcttttttatacaaaaaaataactatcaaatgtacagtatttactgctttcttccaaatcgtactaataatgtagcaaaaaattaacattgatttacaaataaataactgtttaaattattaaataaatattagtataatgaaagtttttccattggaggtttatatgaaaagaataattaaagttggtgctttagcagcaagtagcttttctttattatttttagctggttgctcttcaaataataaagaagttgcacaatatggcgataaaaaaatatcgcaggagcaattttatcaggaactaaacagctctccgactagcaaaacaattctagctaatatgttgatctacggagctcttaaagaagcgtacggcagtaagcttaacaaagatcaggtagaagccgactataatagttacaaaaaaagatatggttctcaatttgattcttttttaaaagaaaactcctatacaaaaaaatcttttaaacaaatgattgaattaaatcatctaagtaaaatcgctttaaaaaaacagatgaagccaacgacttcccaattaaaagaagaatggaaagattatcaaccaaagatcacagttcagcatatttcaactactagccgcgatacagcaaatacagttattgagaaacttaataatggtgaaagctttgctagtttagctagcaagtattctgtcgatagtctaaccagttccaatggtggaaaattgcctgcttttgatatgcaaaatagacgatacgactctactttcaaaaagggcgcctataaattaaaaaatgatgaatataccaaagaacctatcaaagttacaaatggttatgaagtcattaaaatgattaatcatcctaaaaagggtaattttgctgataagcaaaaagaattaactgaagcaatttataataaatgggctagcaactctagaattatgaataatgttatcagtcaagtattaaaagaacagcacgtatcaattaaagacaaagatttaaaatcagctcttgatatgtataaaggttccaataaagcaaatttttaaatactaagaattaataatatatagaaaaaactctattaaattttggtgttaataagcctcgatttaatagagtttttaatttgaattaagatttttaaaggattaggcgctaaattgctgaaatgcaattttagtagaaccagtaaatgagttattcccgtaatcaacggaaattattggtaagcccttatagaaagtcttttcacatttcgctctcaaattaagcaagattttgtgtattttaaattcaatcattaattaaggcaaactctatatcctatgaaatgagtcaactatagatccaattaaaggcttccctttaccaattgtctattagactttttctacttcaatcttattaatagagtatagtttcaaactcatcggtacgttaattttaggaaatttcatcttactgcatttttatttaagttatttttgttatataggcagccttagactatagttattttaattactactttgctgctttaaagtacaaaaaaccgagacccatttctgaatctcggaagtaatagtttattttaaatatctaatttattctttaatctcaaccatcatttcttcttcacgtttttgttcaatcttacgaagccatggtaaaacgaaacctaaaccaaataatacgacaactgtaataatgttcatccataattggtgagtaaatgccttagtaccaacagctacgttttgaggaataaatcctaaagtagcacagacaaaggtaaatagtaaacaccaagaaccaactgttaacgcaccagccttattcttaatgaagacatagcttgagtggtatttttcttggtgcattctcattgcaacaaaggcaaagaatacccaacaagtcttgtatggtgagataattccgtttacgtttaatagccagttataaatggtattgatattaggtaaagttccagttaataagagcaagaacaaactaagtccaacagtaaaggtgtaactgtgaattggacggccattcttgttcttcttggtcaaccattttggcatgaatttttcgccaacatctccggcaaatacacgacttgacgcatctaataatacggcaagttgagccatcataaagattgcttgtacaacggcgaaaatatacatcaataccttacccattcctaaactttcacctaaaagttggaaagcatagtaaggaccgttcatcttaaagtcgtgtggaatcttgtgagcgttgaagaacattgctaaagctaaggttccaaaaatagtcaagaatcctgtcataattgcaagcatccacattgctttaggaaaatcgcgcttaggattcttcatttgttgaacatatggtgcagctaattctgcacctgacattgcaaagattaaaagaccagtagttgagaagtagttcaaactaaatgatggtttaaatgctccccagttaaatggttgagttgcaatatggtgaccatgcattactgaccatgcagctaagagcacgaataacatggacataataaacattgctcccccaccaattaaggaaaggatttctagcgagttacgtaatttattttctaataaaataaagaccaaaatgattacaaaagtcaaaattccgaaccagaaagttgacatcttcttgtctaagctgttgttaccaaagattatccaactgaaagaaacgataactgagtttgacacgtcaacgatatatggcacactctgaacccaatacatccatgaagtccaatatcctaaagtatcatttgtacttcttcttacccaggaagcaagtcctccatcttgattatcaaaagtcaaactcatttgactactgattaatgcgtaaggaataacataagtaaataaaagaaagatccatgaaattacaactgaaagaccttggttttgaaatggatagaagatattttcaaaactaataatcgttacaaagtcaatcagcgcaataactggccaactcatataatgttttttattcagttctaaatcattaaagacatctggtttatccaatttttaaattcccccaaaattaaaatatttatctaaatcctatcttctaagtttggaggtttcaaaactatcattaaagtattcgaattcacttgtagaaatcctttataaatcgctataatttatgccgtagtagtcttgcaaataaaattttgtacaaaaacgtccgcacaaaattataaagatttctaaaatttttgcaagtctattttagaaaatatagtaggaaaacaaggtgattaaatgaattttctaaaaattgcattaagcaatcaacttaaaaataatgattttaattcatggcaaactactaatttgaacgatgaaactcaagctagtgaacttgccgctattgttgtagcagagactgataaaagtagtcttaaaactgctcaagatttacaaaaaaaatcagggcttggaattcctattattaaagtttcacatgaaacaatttctaataatgaaaaaaatcaaataattgatgccgcaaatcaatacacagcagaaatggttcctggctttttaactgatttggtcaatttcgcagaagatcgtccaattagttttacgacaccaggtcatcataatggcttatattacgaaaaacatccggcgggggtagtatttaatcgcttctttggtaaaaacctcatgtttgcggataccagtgatacagtaccagaattaggcgatactatgacccacgaagggacgcctttaactgctgagcaaaaagctgccgaaacttatcatgctgataaagtttatttctgtactaatggaacaacgagtgcaaattcaatttgtgcaagtgcactattaactaaagatgacctagttctttttgatcgaaataatcataaatccctctataacagtgccttagtaatgactggtgccaaacctgtatatattccaactgatcgtaatgcacttggattaattggagaaatggatcctgactttttaaatgaagaaaaaattcgagctgaaattgctaaagttgaccctgaaaaagctaaagctaagcgtccatttagactagctatcattcaatcagaaacatatgatggtcttttttacgacgcgaagtggatgattgataaaattggtaaactatgcgattacattctttttgattgtgcttggggtggattcgaacagtttgttccaattatgaatcacctgtctcccctcaacttagactttgggtcagaagatccgggtattttagtaactcaatcacttcataaacaacaagccggaatgggccaagcctcacaaattttgaaaaaggatgctcatattaaaggtcagaaacgttacgttgatcataagcactttaaccacgcttatcttaaatttgttacctcaagttactcttatccactttatgcctcactcaccgttaactcatatttaaccagcggtgagggtaataaaaaatggtgggaccaaatcttacgcttaggaattgaatggcggaaagaattaattaaaaaatcaaaattatttaagccactagtaattgataattttgaaaatattagtactgatgagttagctacaaatgaaaagtactggaatttagattccactaatctgtggcatggatttagcaaaattgcgtctggtcaggccatgatcgatcctctaaaaattactgttgtaactcccggaattgatgttaaaaatgcaaaatatgaagaaataggtattcctggaccagttgttgcagaatttttaatggagaagcggattattcgtgcaaaagatgacctatattctcttcttttcttattaacgccgggagatactaaggctgaattagatatcttgctgaatgcattcttagaatttgaacaatattataacgaggatgcacctctagacaaagtgctccctaagctaactaaagtatacggcgatcgctacaaaggttataccttaaaacagctctgccaagaaatgcatgaatattaccggggaaataatacctttaccctccagcaagaattatttgcgaaaccagatatgcaaaattatcaaatgactcccgagcatgctgactatctctttatgaaaaatgaaagtgaattagttaacttagaagatgttaaaggtcgcattgctgctgaaggtgccttaccttacccaccaggcgtgttcattgttgcgcccggcgaaaaatggagcgatattgatcaaaaatattttgaagttttagtaggtgctatcgagcgtttcccaggctttgtacctgaaattcagggagtctactgggatcaaaaatcagatggtaaaataagagtacaagcagaagtattaaaggagaattagtaatggttttatcttggaaagaaaacttaccaaccgaattaaaagaaaaagtcgataaagtcgataaaatgattgaacctcgtctagaagaaattgatgagcaagtattctataaccaacaacgtgttttagatatatttagaaagcatcgtgttggagaagaagatttagttccttctactggttacggttatgacgacgttggccgtgataaattagaagcaatgtatgcagactattttaaaactgatgatgcattagtacggcctcaattttcttcagcaactcatgctattgctgttggtctatttagtatgcttcgtcccggcgacacgctctactacttaaccggtatgccatatgatactattcaagaagttattggtttagctggtgacaaaccaggcaacatgaaagaatggggcattgactttaagcacactgatttacttgataacggtgaagttgactatgaacaagctagaaaagacttgcaagatccaaaaattaaagttgtaactattcaacgttctcttggttacgctgttcgtgcaagctttacaatagaaaaaatcaagaagatgcttaagtttattaaagaagttcgtccagacgtaaaaatcttcgttgataattgttacggcgaattttctgaatcagaagaaccaactttctatggtgctgatatgatggcgggttctctatttaagaatgcaggtgccggaatcgttaaagcgggtgccttccttgttggtaaaaaagatctcattgaaggagcaggctcacgccttaacgtccctggtgctggtaaaggagaaggagctacatggggctatttaagagacatgtatcaaggattctttatggcagctcacactactggggaagccttaaagggtatgatttatactgctgctctttgtgaagaaatgggaatgaaagttgcacctaagtggaatgatccaagaactgatatcgttcaaactgtaaccttcggcgaaccagatccaatggttaagttctgtgctgctattcaacactattcaccaatgaactcatttgttgatcctattccatatcaccaagatggttacgaagatgacgttgttatggcctcaggaagctttactgaaggttctacgatcgaattatcttcagacggtccaatgcgtccgccataccgtctttacgtacaaggtggtctttcttatgcccatgacaagattgccatcactcatgctgtagaagaaactttctataaaaaagattagtacatattagtatccttaaaaacggtcagtgaacatcatccactgaccgttttttgatctctttattaagttaatgcaaaatcattttttctttagtctcttctacaaatccacgactccgatataatcttttcgccttgatatttgtggaaaagacctctaaaaaagcgggacgttctaagcaaggaattacagtatccagtaatttaccaccaattcctcttccttgaaattcatttaacacataaatatagcctagttcgttttctctaaaagccacaaaacctactattttgctatcaatcacagccacataaattgtttccgaaaacagttcctctttatacactgccacttcaagtggagcatacagatcaaccgcattacctacaattaattcttgcattctggcttgatcatgtactttgcataattgaacatagtctatatttttatattttctaataattacttcttctgacataactaacctaatttctatttaaaacatcaggagaaataaactcctgattaatggctaaattggctagcttttctacgtaatctcattatcttacctgctttcttatttttaacaatgttaatatattattaatatcattgtcaatatttaatttgaaattaatatatttttgcatccattaaagttttttgttagggtggaagatatacttatattttttaaggaggactttttcgagttaatctaagtgctttaactcatattatgcaaaaagaaaatttgaacaatacaaatactatcaaagaaaaaaagaactataaaaaggctccgctgatgcccattcatctacgggtatttactgctgtattattagggcaaattgcctgtggtttttccctaggtatttctgggactgctctttctagcgcaagtaaatatattacaatcagtgatctatggactggattaattggtgccggatctttaataggtttagcgggaagcatcttaattgggcgcctatctgataaaattggcagacgaaaattattaatgctaaatatgtatatcctaggatttctatcattaacccaattgttaactaataacttaatacttatttttattattagaattctgattggtttaatgattgctgtcgactatacagtgggaaatgctctcttaacagaatggctgcctaaaggcgaagatagtaaaagacaaagccatcttcttatttattggaccattggattcattgcttcatatttaacaggaacctttattactggctttggttcttataattggcaaatcattttatctaccggtgcaattccagcgtttattgccgctatatttagatccattttccccttacctgcttcaccaagttggcttgctagtcgtggtaaagtgaaaaaagctaataaagttatcaaaaaacatatgggacataaatggggccttcctcaaaaattaaaaaaggctaaacccgtcaaggaagtttcttggacaatattattttccaggaaatatttgcgacaaactttagtcggtggccttttctatgcttgccaagcctttgcattctttggtatcagtatttttcttccgattctcttacaaagtatgcatgttactgatcaaaaaatttctggcattatctataatggcggtatgttcattggggtactttttggaattttaatttttaacaaaattagtcaacgtgcatttttaattagtaactttttactctcaagtctcttgattggtttcctagcagtcaataaaaatattaattccaatattcaattgattatcttttgtatatttgcaattgttttatcgtctggattagtacttgactacccttatccaactgagctatttgatattaaagttcgaggaacaggagttggaacttgtatcacaattagtcgttttggggcagcagctggtactttcctattgcctattttaactaatctaggtggagcacatctggcaatgatcacttgtgcttttgttctctttgctgcctttgtcatctgcttaatctgggctcctgaaacttcaccccaattcaaacaaaataattgatttgatactacttttttctaaaattaagtattagaaaggatgagggtgattcctatggtaaaaatgacaattagtcaagatgcaatcgattttcttaaaaaccgtggttataacaaacatgaaatacttttaattgttgatggcggtggcggcgactactcgattgagggcggatcatgtaatattggaatggattattcactaatttcacttgatacaatgaagcacgatccacgctactcagtaaaaattgaaaataatgctaattttgaaatttatacttctgactacgatttagcatttctcggtgacaatttgatccttgatattcataataccaccttacgtttacgtaacgattcgggcatcttaactggcgccgtaaaaatagcaaaggcgagctttttagcagaacgagctaaagaaggaattattgatcaaaaaaattgttaataaataacttttactctcaaatataattttgagagtttttctttacactactttctcattttccaatcctgttattccatttttattttgcacaatagctatagatttattttctaagataataaattgtgatacccaatattccatacatcctactctatttttaaagtgtttttattaaacaatatttcttcatcgtggcttatcataattatcatgcatttcttcgatatttcctccaaaagttgaagaatgtcttttttcatagaggaatggatatttgccataggctcatccagtactaaacactctacatttttagtcaaagcagaataaagttttactaattgaagttctcctgaagaaagagtatccatttttttatctaaaaaatgtttaatattaaatctcttcgaataaaaaacttgggaataatatttattttttattttatcaacataattttctagatattcttcgaccgtacaagatggtatatctatatcttgaaataaaaagcctatattatttttcctcatttcttttctatttattttctcaacctccattccatttataaaaatatcccctgaggtcttagagttatagattcctgttatactacgtaaaagagttgattttccaataccatttttccccgtaatcacataaaatcctggattttcaaacctataggtaacagtatttttaaataattttttctccccatttaaagaaatattcactttattaagaaagatattttgaaccgtattgatttttatagctccatctacttcaggtttcatactaagaagattatccattcgtgcataagatgctttaaaagattctattcttaccaatattgaaaatagattgtctgcttcacttaataattgattaaagtattgtagaataactgaaaaatatccaatagttatttttcctgctattacagacattccaccccaaataaaaagaaaaagttgaaaaattaactgaattccaatttgtaaaagtgacataacataattaagaacaaagtccttatgtccaattttcaatagtttattttcagtctttcttaaactgaatctgttaagcgctatttcttcttttccctttatctctacatatcttcttagccaatcagataattttgaaaaatattcattatatatatttttcaaatctagactaactgtgtacattcttggctttaagaagaaataaaacatagtatatataaataataataatagtattatccaaaaataaagaacattcgttttgataagataaacaagaattatagctaatgagaccaaaagagcaattaactggcttatcgtctgaaaaataaacgatatcacttcagtaatatcatcattaacctgatcagttaattttatcggatccttttttagtatttccaatgtatcttttttatatagctttttgattaataattcattcgcatataaaaaagctcttctataatcaagtatttgaactttatttgtaaaaaaggataggataagttttaaaattcctagaaaaacaaggagacatagtattttaaaaaaatttcctctatctttactataaactaaagaatttagtaactgtccctctaaaaaaatatttccaatcattgctatcgtatttaccatacttgcaagttgtagcaataatatcttatatttatttctttttataatgctttttacaattgttttcataatttctacattttctttaactatccttactttgcttcctattaaaagaaactcctacttgagaactaaggtagtctgatacctaaccatatgagactttttttcatttaaagttgaataaaattataatttatcttattattattttcaatattttttaatgtggttttatttttaacataaaaaagatctcattacattttaagtaattttagaaagttgggtgtaatatatctttgattaatcttaaaaatgttatatcattagaatcaataatttagaaaaggacatattgctatatgatgctaattgtattttagtctcaagggactaatctaccttcccttgagaaaaaacaaatttaaattctattttcttaaggagaaaaataaaaattgaataatactgacgaaatcgaattttcacgtgtacgtaaacttgtagctggctatgccgtttcaccagaagctaaggagaaaattttagctcaaccacttgcaaacaagttagtcaaagcaaatgcgttattagatgaaacggaagaaatgttctggattttagatcatggcctacacatcccttttattaattcagatgcttttacgccaatcataaataaggtgaaaaagggatatatcttaaatccccgagaactagaacaagttgctgactttattagggttactcgcttattagtacgcttttttgataaacaaagacttaaggctccaattgtggccagctattgtgatacgttaactattctagatagactagaagaattaatttatcaagatattgagcgcggagaggtttcagatcgagcagataaagagctgactaaactacgccaaagaagtagtaacttaaatacaactatcaaagaaactctacagaaatacttgcagacaaaaaagtaccaatcaatgttgcaagattttcagattattcaaaaagatactcactatacgcttcctgttaaggcaagctttaagcatagttttggtggaaatattattgatcaatctaataatgggaccactgttttcattgagccaaccaagatagttcatcttactcaagaaaaaactacagtcgaaaatcagatttacttaattgaatctcaaattttgggaaatttaacggcaaaaatctataatgagctagctcattttgaagccaatcttaatgttattgttgatctagattgtatcttagcacgtgcaaaatattcgcatactactggtggcaaacgcccaattttaaatgaacaaaatgagcttcaattgaacggaatgaagcatcccttgttaagtaatcccgttcctctatcccttaagttagatccaactaaacatggcttaattattactggaccaaatgcaggtgggaaaactgttacactcaaaactgttggcttagctactgcaatgactgaatttggtcttttcttacctagtgcagcacggtgctccattccgattatgaccgaaatctatacttcaattggtgatcatcaagacttagataactccctttcaacattttctgctgaaatgaaaaagatggcaatgattgttcaaaaggccactccaaacagtctgattttgttagacgaactcggtagtggaacggatcccaatgaaggtgcagctcttgccattgctattttacaaacgctacaattgaaaggttgcataatcttagcaactacccactatagcgctataaaagattattcgactaaaaatcctgcttttattacggcagcaatggattttgacttacaaactctacaccccacctataaactacttttaaatcaagtaggcgccagtcgtgctctctggattgcagaaaaaagtggtatgcccgacaacgtactgtcagaagctaaagatttcttaaatactggaagcttgcctttaaagcaagcaaatattaaatttaagaataagccgaaaaaagttaaacctctaccttcttttaaaaaaggtgatcgaatcaaagtaccaaaatatcaccaagaggtcctcttttatgagaacgctgatatagctaatcagattgtaatttttgttaataaagcttttgagactgtccctataaagggagcaaaattagttcgaaaagctgaagaactttatcctacagggtataatctcgatttattatttatccaagattggcaagaatataaactaaacaaggatttagatcgcggttctaaaaaggcctggaagaagttgaaaaagtaacaacgcaattatttaaataattataaaaataagctctccagcttactttaagctagagggcttatttgtgtttattcagctatctttatccatcaagttctacgccctgcaattctttcattgcatcataagcagctgatcgtttattatgatcaactccaagaattaacaaatctcctgctacaattacagtatcaccatgaggaattatttctcggcttccccttctaatcgttctaacaagcacattatcaggccagttaatatccttgatttcctgatctactaacttactattttcatacacagggatatctaattcatcttcttcacccgatattggttgtaaacgtgtttctggcatcatagcggctgccaagctgtcatagattggcttgccaccaagaatttgatcgattaaaagtgcaataaatgccacaacagccaatggcattaagtgaagaagcgatccgaccatttcagtaatcaaaataattgctgtaaatggtgcgcgaattatcgccgcaaaataacctgccattgaaaaaattattaagttaataactaagtgtgcaggcattaaaccaagttgtaccattaatgtaccataggttgccccaattagagcgcccatagttaaaattggcaaaaatataccactaggtaaacctgaatcataagaaataattgaaaatgcaattcgcagcacatagtaaaatgctaaaattccaactagtgcccatccactttgagtgagcattttttgtaaagataaaatcaaacgattacctggtccagtaattaacggccaataatacataattggaattaaaattgctaatggaattaaaccatgtagccaacgtggtaaccaggtgatttttaaatagactttttttaatccaaataaaccttttttatataaatggcctaatagtcccaggataattcctaaaatcaccaaatgccagtacaaataaattggaaatgaatgatcatatggcatccctaaagcatggtgtaagccaaaaaagtaggacaccataaaattagcggcaattgctcctaccaaggaattcatccaaactcgcggagaaaaattatgaaaaatttcttctaaaacaaatagtgctccgctcaatggtgctccaaatgcagctgacaaaccactggcagctcccgttgcaagtaacaccctttgattgtatttactttgttttagcttctcacccactccttggccaatggatgaaccaagttgaagggatggtccctcaggtcctagaaacaagcctgttccaattactaagattcccccgatgagctttctccacaaaatctgccaccatttaagttggagcttaccttgaagctgtaatttaacttccggaataccggatcctccaacgtgtggatactgtttaacaaaatatcccgctatgatccctactgcggctaacccaagaacaattgcaacaaaccaaactggattattatgggcctctttaaaaagatagagccaaaaagcagacgtcttttcaattccaaatctaaatagtccaactacggcacctgcaattagtcctacaattaatgcctgcagcatcaattttagattatctttttcttctttcctcattcttacttacctacatccctatttattagatactgctttattttaacgcaaaaagtcactacatctgtagtgacttttttagtttcatgtgaaacattgttatttttcttcgtaccattcagtatggaaagtacctggacgatcatttctttggtaagtgtgagcaccaaagtaatcacgttgaccttgaataatgttttgaggtaagcgtggattaaaaatagattccaagtaattcaaagctgcactaagagttggagttggtacgccagcatcagccgcaattttaaccacatctctaagagcgccaatattttctttctttaccttatcaaaaaatggagccttgaataagttaggcaagtctttatcagcattatacgcaaacttaatatcatgaagcatttgtgagcggatgatacatccagcttcccagttttgggcaatagttgaatagtgcaagcgccagttataagcttttgcagccatcgttaattgctcaaatccttgaccatatgaaacagccatagctaagtataaggcttttgcaagttgatcaactaagtcctttggagctttctctgggtcaatctttggttcaggatcatttctcaaagttgcttttgacataaaacgagcaagaacggcttctgcaattacagtaattggagcacctaaacgaattgcatcttcaagcatccagttaccagttcccttataagaagcttcatttaagatatgatcaataatatgatcatcagttaagttatccttttgttttaagaccttagaagtgatttcaattaaataagcttgtaaaccacccttatcccaattcttaaagatttcactcatttcattgtttgaataatgaccaacggtgcggagaacatcgtatacttcagaaataatctgcataataccatattcaataccattgtgaaccatcttcacatagtgaccactacctgctggtccaatgtatccgacacatggttgaccagttggagtcttggcagccatagcttcaaggattggcgctacttcttcataagctttttcatcaccacctggcattaaggcaggaccgttcaaagctccttcttcaccgccagaaacacccataccaatgaagtgaataccatgcttttccatttccttatagcgacgattagtatcatggaaattagaattaccaccgtcaattaaaatatcgcccttatctaaaagaggcaatagtttttgtaaagtttcatcaactggtttaccagccatgatttgaatcaagatttttcgtggcttttctagtgaattaacaaattcttcccaagtataagttggctttaaattcttatcttcatattttgctaaagcatcaacctctggcttatcaattgaaaatccagagacagagtagccatgatttttaacgtttaaggcaaggtttttccccataacggacaagccaataaccccaaattgttgcatatttttgcctccacatatttaataaaattcgttcatctactagtatacttttttattatgaatttcgcacaattttgcttactttttattaaaaaaataaagagtccagctatgtgaactctttatttaattatttcctaggaaattaatggcgtgatgcacctgatgaagcatcttctttagcttcaactggctctgcctcagtatgttcagatgcaccagaagcagcatctgcctcaactccatacttaccagcaaagtaactaaatggcttcaaagcttgagcatcatatttagcaacgaaagctggatcgtctaaagtatttaattcagttgaatatggcatgtcatgagtaatcttacagtcgatcaaaactggtccttccatttgttgagcagcagctactgcgtcttcaaattctctcttagtacgaacagtaaagccttttacattcataccttcagcagacatagcccaatcattatcaggaagttttacaccagataatggttgatgagactcatcgacttgttccgcttcaatataacccaaagtttcatttgtgaagaccacattaataatatgcatattgtagcgtgcttgggttaaaagctcttggttcatcatggcaaagccaccatcaccagctaagttccaaacctcacgctttggataaatagtagcagcggctaaagcagctggagcgccatagcccatagttgcatataagccggaggtagtccatttctgatcatcatgtaggtgcatcaaacgatcaaagttaatatttacattacctacatcgactgcaaatacggcatcattagcagccttgtataatggagattctgcacgcccttcacctgcttcaattaaggcacgtaaagttttcttggagtcagctaacattggaacagttacagcatgacgcttacccaatctttctgaattaatatcaatttgaattacttttgccttaggattgaagaagaagatagagaatggtgaattgttaccaacccaaactactaaatcggcatgagtttgaatgtcattacttggcttagcacccacacgaccaattgaacccatatatgctgggaactcatcctcaacaattccttttcctaaaactgatgagactaatggcatcttaaatttatcagaaaattcctttaactctgcactagcatcttgggcaccatgaccaaagtaaataattggatttttagcttctttaattaattcaagtgctttatcaatttgttccttgcgtggtgctgggaaattaggaacaatcttgtgtgctgcagcattattacggaagttatcttcaatcttatcccaaccaaaatctttcggtaagattaaaacagctggacccttcttttgataagcttgacgaattgcttcatccattaaaactggaatagcttccgctgtctttgcttggtgattccaaacagcgactggatcaaaccatggcttttcatcaaaagcttggaagaaatcaatatcttgacgacttgttggaacattagcaacaattgcaaccattggtgtcttgtcatattttgcatcataaagtccattcattaagtgaacggcaccaggacctgcagaaccaaaacaaactcctacttttccactaattttgtattcagcagaagctgctaaggcaccagcttcttcatgtcttacttcaataaactttatcttatctcgccaattatgaattgcattcattgttgagtcaaatgagccgcctggaaaaccgtatatatggtcaataccccagtcatataagacttggaacattgcatctgagccactaatctttgtcatagtctataagcatctccttaatgttttttcttacaccttgattaaagcacatttgtaacacaattgaaagcggttgctgtgactgctagtcctgtatttactcattatcaaaaataattaattcacaaactatttactcttctttcacaacttatcattaggtagcaactttaaactgtgattaagtgatcatactcaacaaaaaaagcaaaaaaattttttattttttttgctttaaaactaattatttatttttcacttttgcaattcggccttgttgaatatatgccgttaatattgccaaatcagctggatttacaccagaaattctttcagcttgagcaattgactcaggacgaatcttttcaaatttttgacgtgcctcagttgccaaacttggaattgcgttgtagtcaatatctactggaattttctttgattcaagtcgatgcaaacgatcaaccaaggtcttttccttcttgatatacccttcatatttcaatgcaatttcaacttgttctttcacatagcgatcagtagctaaagtttcaccacttaatctttcaactgcgtcaaaagttacacgtggtcgcttcaaaaagtctgcgccgctaactcctgcattcaaacgatcttgcttaacactagctaaatattcttgaacctcatcagtagggtgaatggtaactttcttaatagcttccattgcctgggaaatagcttgctttttatcttggaattccttataacgatcttctgaaatcaagcctaattcatgacctttttcagtcaaacgcaaatctgcattatcgtgacgaagaagaagacgatattctgcccggctagttagcaaacgatatggttcatttgttcctttagttactaagtcatcaattaagaccccaatatatgcttcatcacgttgtaaagtaaatccaggcttattttgagcacttaaggctgcattgataccagcaattaatccttgaccggctgcttcttcataacccgatgttccgttcatttgaccagcagtgaagaggtgcttaatattttttgtctctaatgtatgctttaattgccaaggttcaattacgtcatattcaattgcatatcctgggcgcattaattctgctttttctagaccagcaacactatgaagcatcttcaattgtacttcttcaggcattgaagtagaaaagtcacctacgtatatttccttagtatggcgtccttctggttccaagaaaatttggtgacgatctttatctgcaaaacgaactaccttatcttcaattgaaggacagtaacgtgggcctacacccttgataaccccagaaaacattggagcacgatcaagatttgcacgaataatatcatgcgttacggtattagtgtaagtcatataacaagacatttgatcttctaggtaatcactatctttgctagtgtaagaaaaatgtcttggttctttgtctccaggctcttcttgagtttttgaataatcaatagtatttccatccactcgaggaggagtaccagtcttaaaacgacgtaatttaaagcctaacttttcaagattttcaggtaatttaatagatggaagtgagttattaggacctgaagaataagccaattctccaataataatttttcctctagcagctgttcctgtggtcaagacaacgcttttagcatagtactttgcaccagtattagtaatcaaccctttacatactccatcttcaacgatcaactcatctgcaacagcttgacgtaaagttaaattaggctcgttttcaattgtatctttcatacgctcatgatattgccatttatcggcttgtgccctcaacgctctaacagccgggcccttacctgtattgagcattctcatttgaatataagtggcatcaatgtttttacccatttctccgccaagagcatcgatttcacgcacaacagtaccctttgctggtccaccaactgatggattacatggcatgaaagctaccatgtctaaattgatcgttaaaagaagcgtcttttctcccattcgtgctgatgctaaggctgcttctactcccgcatggcctgctccaacaacaattacatcatattcatttgattcgtaagtcttcattttcatcctactttccaagacagaattgactaaataattgggtaattaattcatcaggtgcactttcaccagtaatttcacccaaagtatcccaagcatttttgagatcaatttgaaccaaatctaaaggcattgcatcatcaattccattgacaacgtcttctaaagattgctttgctttggctaataaaccagcttgtctttgatttgtcaccaagatttgattttgtgaattttctattccgctaaagaataattgctcaattgcattctcaagcgcagccatattttcttgctttaagattgaagttacaataattggattatcagtaatttctcttatcatttcctgggaaatttttgtgcctagatcttgtttgtttaaaatgataattcgttttttattagcagttaaatttaataaatttttatcttcgtctgttaaatcttgacttgcatccagaagtaaaagcaccaaatcagcttcagcgatagctttctttgaacgttcaactccaattttttcgaccttgtcttctgtatggtgaatcccagcagtatcaatcagcttcagcggtacgcctttaacagaaacatattcttcaagtgtatctcttgttgttcccgcaatatcagtaacaattgccttatcgtcctgcgttaaataatttaaaagagaggatttaccaacatttggtcttcccacgatagccgttgctagaccattacggataattttcccttcctgagctgtttttagcaattgatcaatttgctttgaaacttcttcggccttcttcttcatttcttgagaagttaaatcgtccatatcatattctggataatcaatattcacttcttcatgagccattgtatctaaaagttcttgacgcattgttctgattttatctaacaatccaccagctaattgtgtcatagcaacttgacgagacttatccgtcttagcccgaacaatatccattacagattcagcttgtgtcaagtcaatacgaccattcataaaggcgcgcttagtaaattcacccggatcagccattcgagcaccgtttgccaaaagtagctgcaaaatatcattagttacaatcattccaccatgacaattgatttcaaccatatcttctcgagtgaaagtttttggtgcgcgtaatacactaaccattgtctcgtctacaacatccttagttttaggatcaacgatatgtccataatgaattgtatgtgagggaacctgagttaaatctgctcctttaaaaagtttattagcaatcgctactgcatcttcaccagatagacgaacaattgatatacctccttcgccaataggagtagaaattgcagcgattgtatcaaattgtgttaatacttgtgccattttttcacctacataaaataatcttaataaaaaaagtgcccactccaccactacaaaaaataatgatggataaagcactttgactactttatcttcaaattaaagataatttatttttgttgtttacgtcctaaacgtttgtatgcgcgacgaactttgcgctgacgttcacgttcttccttcttttgttcctcaagttcacgttgatacttgaatggattttgcaaaataaaggtttgaactacttggaataagttggaaatcacccagtaaagtgaaatcgcagattggataccaattgctgaaaccccaataataagaggcatcaagtatgtcattcccttagtcattccattttgtgaggattggggcgttgacatctgactgatgtacgtactcataaaagtgaatacagccgccaagataggcatgatgtaatatggatcgggacgtcccaaatccatccacaaaaaccgaccattttgcaactgtggagtccgccaaattgcttgatacaaagcatacataactggtagttgaattaacattggtaaacatccagtatatggattaataccagcttctttatacaacttgctagtttcttcttgtaacttttgacgtgactcaacatccttacctggatactttttacgcaatgcatccatctgtggttgcactttttgttgcttagccatgcttctaatagaaatggcattcaatggtaataaaattattcttactataatagtaaagataatgattgcccaaccataggaatcatgaactaaacttgcaatccaaagaataaattgggaaatatagtaaacaatataccgatcccaccaattgccactagtatgagaaataggagcaacacttgttccattagttgatgcacaacctgtaactactaacgttaaggcaagcattcctaaagctaatagaatcagtttccaatttttcttagacaaatgatttctcactctacttttcctcaatttccgtctcttcgctcgataagaccttggctaaccttaaaacatgaataagattctttttggttcgtcccatatcaaaatctcgtgcataaggtcgagctattactaaaaagtctaaatcaggccttatctctggcttaagttctgtcagtgtagcacgaatgaaccgtttgaggcgattacgtgctaccgccgtatgacctacttttttcccaacagaaattccaacgcgaaaatgcttttgattttctttgggtaaggtatagacaacaaagccgcgattagccattgactgtccttctttaaaaactttttgaaagtctctctcagtttttacacggtagctttttctcaatctggttcatccttacttaaattaaaaaaaccactgagcttcagtggcttaagcagataagacttttctaccctttttacggcgtcttgctaaaaccttgcggccgtttgctgtagccatacgtttcataaaaccatgaacgcgtgaacggtgacgcttcttaggttggtaagttctcttagttgacatttaatgttgcacctccgtttttcaatgcttaataagcacaatttctaagatagaatagcatatttacgcgaaaaaaccaaggccttatcaaaattttcctaaaaagaaaagttatttttaaagcatttttcaaattattttttgtggatatctttttttaaattttttatttattttttatcaacaagatcattctcagagttatgcacaattcacaccctgtttagaacaaaataaacaccctgtggaaaatataacctatttagcataaagtgttgatttatggcatataataaactcacatattgctgtggaaaacttaaacttgaaattttatttcacacttcggtggatttctatttttatattatccacatacctgtgaatttgttaattctttttattacttgtggaaaacttatttaattcatgctacacttattttgacttattctgtggataatacagtatttggaggaattttt